United States Patent Application Publication US 2022/0211063 A1 - sequence listing, part 9

SEQ ID NO: 8 - DNA, 7752879 bp, Penicillium roqueforti (residues 5,814,661-7,752,879 of 7,752,879)
  misc_feature (471)..(2988): n is a, c, g, or t
  misc_feature (125072)..(125245): n is a, c, g, or t
  misc_feature (177030)..(177805): n is a, c, g, or t
  misc_feature (384129)..(384319): n is a, c, g, or t
  misc_feature (555860)..(555885): n is a, c, g, or t
  misc_feature (601274)..(601374): n is a, c, g, or t
  misc_feature (676765)..(677109): n is a, c, g, or t
  misc_feature (719635)..(719834): n is a, c, g, or t
  misc_feature (1142860)..(1143077): n is a, c, g, or t
  misc_feature (1186408)..(1187030): n is a, c, g, or t
  misc_feature (1335891)..(1336062): n is a, c, g, or t
  misc_feature (1623998)..(1624186): n is a, c, g, or t
  misc_feature (1638152)..(1638319): n is a, c, g, or t
  misc_feature (1653332)..(1653453): n is a, c, g, or t
  misc_feature (1825656)..(1825836): n is a, c, g, or t
  misc_feature (2226455)..(2226603): n is a, c, g, or t
  misc_feature (2393442)..(2393608): n is a, c, g, or t
  misc_feature (2448145)..(2448283): n is a, c, g, or t
  misc_feature (2535420)..(2535533): n is a, c, g, or t
  misc_feature (2537093)..(2537315): n is a, c, g, or t
  misc_feature (2854224)..(2854262): n is a, c, g, or t
  misc_feature (2984634)..(2984883): n is a, c, g, or t
  misc_feature (3020936)..(3021095): n is a, c, g, or t
  misc_feature (3033772)..(3034149): n is a, c, g, or t
  misc_feature (3159378)..(3159499): n is a, c, g, or t
  misc_feature (3215603)..(3215868): n is a, c, g, or t
  misc_feature (3224663)..(3224965): n is a, c, g, or t
  misc_feature (3317546)..(3317826): n is a, c, g, or t
  misc_feature (3542230)..(3542405): n is a, c, g, or t
  misc_feature (3623237)..(3671736): n is a, c, g, or t
  misc_feature (3674276)..(3676312): n is a, c, g, or t
  misc_feature (3691086)..(3691320): n is a, c, g, or t
  misc_feature (3731831)..(3732089): n is a, c, g, or t
  misc_feature (3989186)..(3989361): n is a, c, g, or t
  misc_feature (3992145)..(3992256): n is a, c, g, or t
  misc_feature (4101501)..(4101938): n is a, c, g, or t
  misc_feature (4339075)..(4339204): n is a, c, g, or t
  misc_feature (4339582)..(4339886): n is a, c, g, or t
  misc_feature (4384249)..(4384411): n is a, c, g, or t
  misc_feature (4533861)..(4534087): n is a, c, g, or t
  misc_feature (4697184)..(4697354): n is a, c, g, or t
  misc_feature (4793975)..(4796690): n is a, c, g, or t
  misc_feature (4802292)..(4802664): n is a, c, g, or t
  misc_feature (5082703)..(5082846): n is a, c, g, or t
  misc_feature (5096885)..(5097041): n is a, c, g, or t
  misc_feature (5239633)..(5239771): n is a, c, g, or t
  misc_feature (5277986)..(5278170): n is a, c, g, or t
  misc_feature (5381360)..(5381559): n is a, c, g, or t
  misc_feature (5479545)..(5479976): n is a, c, g, or t
  misc_feature (5512536)..(5512732): n is a, c, g, or t
  misc_feature (5631457)..(5631544): n is a, c, g, or t
  misc_feature (5721942)..(5722166): n is a, c, g, or t
  misc_feature (5729059)..(5729204): n is a, c, g, or t
  misc_feature (5774252)..(5774341): n is a, c, g, or t
  misc_feature (5808718)..(5808762): n is a, c, g, or t
  misc_feature (5833194)..(5833311): n is a, c, g, or t
  misc_feature (5846751)..(5846942): n is a, c, g, or t
  misc_feature (5859879)..(5864600): n is a, c, g, or t
  misc_feature (5865581)..(5948580): n is a, c, g, or t
  misc_feature (5949161)..(5949595): n is a, c, g, or t
  misc_feature (6008652)..(6008740): n is a, c, g, or t
  misc_feature (6324675)..(6325396): n is a, c, g, or t
  misc_feature (6373521)..(6373881): n is a, c, g, or t
  misc_feature (6805860)..(6805862): n is a, c, g, or t
  misc_feature (6847293)..(6848308): n is a, c, g, or t
  misc_feature (6999877)..(7000009): n is a, c, g, or t
  misc_feature (7043639)..(7047446): n is a, c, g, or t
  misc_feature (7057193)..(7057698): n is a, c, g, or t
  misc_feature (7108603)..(7109374): n is a, c, g, or t
  misc_feature (7114511)..(7115199): n is a, c, g, or t
  misc_feature (7152289)..(7152484): n is a, c, g, or t
  misc_feature (7347604)..(7347710): n is a, c, g, or t
  misc_feature (7355867)..(7355871): n is a, c, g, or t
  misc_feature (7379349)..(7379623): n is a, c, g, or t
  misc_feature (7441770)..(7441995): n is a, c, g, or t
  misc_feature (7525120)..(7525239): n is a, c, g, or t
  misc_feature (7750736)..(7752649): n is a, c, g, or t
gtactcgccgcgagggaagtctgaaccaaaagagtctacagacgctgaagtaaacttgcctaaagaatatttactccaggtactggacccagtcggactccagacagattggtcgtctaggctggtacggctggagcccatcgccgaaggaggatagagcctcccagcccgagagcggggtttggatgaccatcgtgcagctccatggcttgaattggcggaacgaccacgaggaaagatatcagaaccactcttgctaattgtgctagggctcctgcgaagagtgttgctagaggggcccaaaaagttgttggaagacatgcgagatacttcacgttctggttgggcaccgaacaaaggcagtttttgcttttggatcgatgtgtagaattccttgagtactgcttcaacctgttgctcccaggctctcactgttccggtgaatggcgtattaaccaaaggcccaacatcatttgcaccgccgtctctgtcaaacaagccgtgggtgacctctgaagggaaagttgcagagcgtgccgacgtaggggcagagtgcgcttcatgggattgagccttggaccggttgactggacgcaacgtctcaaatccctccggtgcggcatccattgcgactcggtgtatagtgggcatggtatttcgaacgaattgagatttggtcatttttgaatcgatgtcagccatatgcagatcagtgtttagtagcaaaatagaatagcaaatggtatggacaacgtcagtagctttgaagccatgactcgggttgcaatcacaccatctggtggaaaaggcatccagcactcgatccacttgttgagtttctcccttgagcaccaaacggtcgcaaagagcccgaagagaggccacaatgttgagattagaccaattgtacagtcgcatgtatgcttcacggaccattgcccgatcagggtcacccagccaagcggcagcagactcgttgcctaccatctggtcctggctgtcgaagagcctctgtgcttgttctcgatctgtagctgtgggtccatcttcaatagcttcgccaggtccatctgcctgatcttcggtgtcatcagactgagagtcttcctgttcaatgagtggggtgttcgcagcggtctgataattcgatgctgttgatatagaatcaacaggagattcgcaaaccctgtcctcggacggaagcgccaatctagcgacattgatttgaggaattgcgacctgtgatttgatgctgcgcgagaaattttccacaacgggggacagggtactagaggcagtaacactctgagacttttcctgcaaagccaagtctgtgaagacttcgccagttgaagatcgatccttctctgtaagaggcgagatgtcctgaccacgagaggcagttgagggctgcagagaagtcttcggtttgggagctccaggagctgaaacactttctcttttcttctgcgcctgcaaaaatgccggttgtcgaattttagcctcccagtccgcattttctttccggtctgattcctcgtcgagataaggattcatgatctgccgcaggctactcacagggcttggagccgccatattatccatagtctgtggtgcaagatgttgaggaataacaattgggggaggagcatggtcaggtaccgacctctttcttctacggaagaacgaagatttcttgttcacgacctgatggggtcctgtgcgagttgaggacggagaagcacctgcagggctcttaactgcttgctgaggtcgtagctttgggctggcagtcatcccattggtttctctactctcattttcttgtaaatgtgacagatcgttggcgtttatacttgctgcatctgccggtccagggactgaattcttagatccaaatacacgccggaagaaacctgggcgttcttttgtgattggagcagtatagttggtggagatgttggccgaaattgtggtggttgccgttgagtctgggggaggaaaagccggcttgttataggagatggtcggactgggggcaggcgagtccaacgaagccgcaatggtcggagggaggccaaaatccgtatcatccatattctggaagtcgttatcccgagctctgagagttcccgtggcgagattttcaggccgaacctttcgaacctggggggcataagcagttttcaaactgttccgtcgcggtactaccggtgtccgcgcggcagcagttgctggcgtcctgccataatcgtgaacctttcgtggtcctgccgggacacttggggtgggtgcagcatcgtgatcgttgtacagcgtcaagtcctgcccgacactgggatcagcataaggtgcgaacgctcgttttggcccgcaatcgaagctggctgaacggcggcccaagccatgatctgctcgtgctcttgggattgtgtatgagtagtccgcggtggaggatgagcttcctttgctgtcttttcgggtagtatttgttcgtggcatagttccgatacccccgcgcgagcttcctatctgcctcggtgtctggttattggagctactgttgctgcgtcggcccttcgctgtgattgttgcgtagcgatcattcccatcttcgtatccgtagtctggttctgaggacactgacgaggagaaggtgtgtccgcggtaccggccgtgcgaatcggattcttgtgagtaatgactgtgatggtcggtttcgaaggcggaattgaaaagacgatagtcgtccagaacagacgaactagaggcgaattgatcgagcgaaagaagcatgttgtcgacgatcgacgttcgtgtagcatgttgcggggatagagagagatcatgcgggtctcgatcatccgactcactggttctcgctggattatccatgacatctgggaaagcatcgcggatggaaggtcgctctgggtatcctcgtttggagggcttgtatcttgcggtttgggagggtggtgtatggggaggagagtacgcctcccgttgggacattattgcgctaaccaatgttaattattttattccttaggctgatcagatttccaatccacacaaagggaatgacaggctcattgtagtagttgaggggggatggggggattcggagccactcggtttccaacataccagatctcttgcaggtctcacaaggtaattgactaaactgaattcgacctgcagtatccgatttgacgaattgaatggtaattcacttggtcattgtcccacgaggccagggatgtaaaaaagaaagaagatcaaaggagtgtaaaagggtgggcaatagcaagaggaacaagaaaccgggggtggaacgaactcctgagagtcggggaggttaggcgggaactttttaaagcctctccgctactgtattggtacttttttataatatgagacatacatagttaatcaggaagaatttaacatatgatattgaatagaaacatgcgaagggggaaattgcttgggtttttagggatctacagattcaggggtttcatacatgcatattcagggcttatatagttactttaggtcgacttgaatagtagtatgttataagatatggatattagacagcatatatcaatgctctttgccttgcaatccttcaagcacaatctacaatctacaatatgttgtatagccaaaagtacacaagtggagctgtggggatggatcatggagctctttgtatgttgatttccgtgaatagagatagatctccgtagagacagttatagacgaatgcctgtgtagatataagtgaatcccagactaataactagagcactccctatatctctttcacggtatactaccccgtatccatgtgaactagtgtatgtataactcaagtcttatagattggccccttgcagagtggattatctggagaggaacccttttccagcggcaatgacacctgttcagaagagacatgagttgagatctatctagattgtaaatcctagtagaagagggtatcttatacagagtactgtgtccatcaggaactacataaaacataaaatccaaaaatcaacaaatgaccgatatacccaacacgtgatcaagaagatgacataaccgggcccaactcgcatcggatacacgtacaacaattgaactgcattgtgaatgctccgagattgatttccctcctcgaaaacggggtctaagatcatgaaccctcacatctctgtcccccgccaacatgccggccctgccaacttcggctcaacacctgcaacccggtctagtgtccgcatgccgcgcttcttcaagaggtagtaggaccaaagaatcccggcacgagagacaatcactgatatgggacaggcttttcaaattcccacaaatggactttgaaatggcaatttgggagatgacctcgttgctgatcgcacccaagaaggtattcaaatcgatatactaccatgtaagtggtctctatcctaactggccctcgaactatgctgatcatgctatctgatttagaaacgtgagtctacttattattccaaacttggctagtgcctcgattgaacaagcacatacaactggcaataccggttactatcgtcccagccgagcactattgacgccttggagcagaaaccaaaaacacatggcaccggcctgatccgtcattcacctacctactatcattcttcctcctcctcacagccctcgcatggggccttgcttatacgccaggcttcggcgcaattatacgactcgctttcctcttcgtgttcgtgcatttcatcggctcgtcactgctcgtctcgacaattggatactttatcattggccgtctattcggtccgaacggagctgccgcctctctagctggcctgcggggctcccgtggccgaagacgaggtgccgctcagggcttgtttactcagccaggggagaaggagcaattggagtttggatattgttttgacgtaagactccctgccataaattccgtggaatctccgactcactgacactgtcgttgcataggtatccaaccgggccttctttcctctatatctccacctctacgtggtgcagttcctccttctgccgctcctcacccgcagcccgagtaatttcctggctactttccttggaaactcgctttacctctctgctctcatttactacacctacatcacgttcctgggatacaatgctctcccattcctgcacaacacagaacttctgcttgtgcctatcctcatattcgccgttatgtggctagtcagcctgattgccggttggggcattgtcatgcaaggccgcagcgttgaggggttgttctggggcgtgtgaagtagcaagcttcccccgaattatatcctctccctgggatttccattccctgtacgaaacctgaaatatctcttttgtcgggctcatccctcctcgaaaaaaagccagccccaaaatgaggcgattatctaatgctatgggggcgtcagtgtacatgatttcaatttacatgattgcgcatatttcctactgtttgattgattccagatgtccaatgtgaagagtatctcaactgtttgctttgtttttttttttgttgtctagatgtgtaaccaacaattcgacccaagtcatgaccacatataaagcgaaatccacaagcttatttcttaccaactttcttagtcttccccgaagctgcagcacgcaaacgatcctctcgctgctgagcggcatcggcacgctctttggcttgctcgtccttctcctccttctcggccaacttgcgcagacgctccgtctcacgctgctcacggataacggcgagacgagccagatccgacttcgcctcgtcagtcttaccctcggcgtgcagcttctggtaacgttcacgggcctgctgggcctggacggcctcgcgctcccgtcgggacaactgcgagatatccttgaccttagcgggcttcttgggctcagcggcggggtcggcgacgggcttcagggtctgcgagcgggacttggcagtgtggttggggttggcggggagctcgccgtcggattcttccgagtctgaagggggtaagtcgcccggttgggcgggtccttggcctcgcttcttcaatgcggctgccttcttagctttggcagcagcgcggcgctcctcgcggcttcctgcagctgtggatgactcgatcggcttgaactcgtcctcgctggattcctcggagctttcttcttcggatgaagaatcttcgtcacccgatgacttgatttgctcaccaggctcctatgagagggatgttatgatcaggatgctgtacaaattgagttcattggggctgaagttcacttacccgccagagacccatttgattgccatccttgtctaatggctgaagatctctgctgaagtgcttgcctcctattcatcgtctgatcagtttcaagtatctcgtacttatgctcaggcgcacacgacatacctcctcgagtaggcttggagaactttcctccacgaccacggggcgccatattgatatgtaggaaatacttgagagcttgagagctttggtaacaaggctgaagtaatgtatatctctatatcgagaacgagttagcgggttctcattgaggggggtttcgcacacaatgaatggaggggcagaggcggggtgtcgcttcagagttcctccaggatgggatcaaaataacaaatcacttacatggagaattcaaagtagtttaaagatcttcaaatgttgtaaaggatacaaaaattcgaagggaacaagttcgcgagttgtcaagtcaccgcgctcgcattaaatcacatgtggagacgtttttcttctccgtcaaaccacaagtcgttgatttgttaagacatacaacatgcaacatacgacatttgggatatatgtatagcattatcattatatcttctatattcctatatactatctattttatcatattctcattcatcagactcgagctataccagtgcccaccttggtcactcgagccccaatcaacgtcaatccaccaaggaggaccgcagatcccatgaacatctgggcgtacaggtaattgccattatcacgaacaactagctcaccagcaataggagaccctatgagggctgccactgccaccacgctgagtaccatacccatgcgtaccccgatcttcttcatatcagtcgtgagggtgctgagggtcgctgggaacaacgattgaatacccgcagcaaagaggccataaaacacagcaaatgtccatagcccggacaggccgtggactgccgcccagcagtagccaaccaaggccgtcgcgaaactgaacgggatcaacaggttgagaggaccggtgagctgatcagcaagcaggttggggaccaatcgcccgaccaatccgactccgttcatgactaggagcagatcaatagatcgatcacttgacacgccgatgatgttccgactgaaactgccgatgtagaaaaagccgacatacaggccccagaagttcatgaacatgccaatcgcaaacagcaagtagggcagctcggtgaaggcagcccactcgacaatcggaccagtcttacgtggaggaagacgctgcttaaggaacagcacacagggagtcagcgtggctaccgagataaagcccagcgttcgtattgtccacccatatccgacatggggcagcatcttcatgacaacagccgggaagaccaggccccccgtcgcagagcccgatgcaacgaggccaatagcgatgccacggttcttggcgaaataagtcgagaccaaagctagggttgggcagaacatgagaccacacccaattccttggccaacaccctgtgctaggaatagctgccagtactttgtgcagagcgaggtcatgaagatactgaagcattctaagatagcaccgcaggccagagtaaatgtgaaataaccggcatcggtggccctgccggagaaagtgccaataaaaaacaacaaaaagatctggatactcccaacccaggagatatctgagggcggatgtcccagtgtctgggaatagtatgtctggaagacgccgaagctattgatataaccccatgtattgaagatgacgaagtgtgcgagggcaacctgcgaccaagcctgaaatccgccgtccggaggcggcccgagatctttgccagattcccgagtgcgcaccgccgagagggtacggctcaaggcgctggtgttggttggtatgtgggaaatgttgagttcatgtctgatggttgattcttcatctgaggaatggcgagtatggtctatgtccttttcgttctctgtatgttcttcggtcatacttgagggtttcttggatatattggccatgttagaagttgacatggttccttgatgcgccttgtacatgtaggagtcttccaagataacaaaaaacttgtcaaatgagtcaagtcaaaattggggaaaaattcttataacggggatctttccgatcgtcgttcgcagagatggccgcgcccttcggatgacaggtccacttccgaagttgtaagcgtatctttttacgttgcatctatattgtatctatagctaactcctattttccaagttgaatagcctctaatatctacattatacatgtatctatatatcttatattgaccccacactcacttgatatggcgcaatcccggggtccccgcaaaaccggctctctcggatagttctaggtacgtctactctttgtatgtgacatgacatttcagggaattcaatggctttctttctagcacgtaaatacatgtgagtctatacaaaatcatggcaaaaaaacctgtcgtaggaaggtgaaaagcaagggagcataaaccggagccgagctaaacccgtgttggcggaggtaatgcttggatagcaagcaacctttgaactagtgcagtgtcttaatatgggactaatgggccgctagcaatagatcaacccatcttcaagatcgtgtgataatttccggcatgcggacctgaaacggatgccaaggctagattccccgatgaagcatggcgtatacttggctgtggcgggtaatcatcggtttgttggccaaagtcttgttcaaatctcagtgatcttggttggcgctgctaaaaagcatttgaattgacccaataacatcggccggttccaataagtgccagctggcatcggtctgctttgagctggcgcccaccgtaactgagtaaacgtggtcgcgtggtagatcaaacttcttgagggctcggaacatatctaaattgaatgttaatccaggatctcagcatcaatcaggtgggcaattttaccttcatcggtgaagtcatcacccaaacataggatgaagtccggtgccttccccggggccgtgccatattcgtcaaccaaccgggtggcgataaatcccttgttcacaaaggttggccggacctctagattggccttgcctgccatgacttccacatcccatcgtttggcgacagtgtcctccaaagcctttcgacactcgcgagcctggaacgcaccgtactctgggtctgcacgacgatagtgccaggtcaatgctacccgtttccgttcaatgaatgaaccttgtgttcgctctgtgtaatgttggaagacatcaaccacttctttctgccatcccatgtcgcttttctcggctaaattctcccaatcctcagatccgggctttcggataaaacaaccgtgctcggcactcaatcctagttctgggatatggcccatccactcgtccaggaaagcctggtcccgtccactgataatccacacggcatttcgtgggtcagccgataggctcttcagagtacggagtacccgatctgaaggaatggctgcctggggatccttgacaattggtgtcaatgtgccatcgtagtcgaacatgaacagtcgtcggcgagccttgcggtactgcttcattagttttgcgcgatcgagtgcaggtgtagcgacggattggtcaaaggacgaaaggttggtcagtaggcgattgaggaattgcctggaccacatggaaactgtgttggtcaccacatgcttgtataactggaggtgttgctcctttcgctggtcggctggcatagtcaatgcttgattgatcgctccagccaccccgactagatcccacgggttgatgtggatggcactaggcagggtgcccgccgttccggagaattcggaaagaatcaaagggctgtggttggtttgttgacagacaatatattccagactcgttgtgttcatgccatctcgcaccgtagtgatcaagccgacatcggctacacgcaacagagcgaaatactcgcgtggagataagtattgcggatagtactgcacgggcgagaaactcaaagagccaaatcttccgttgatggtcgaaaccaaattggatatttggccagcaatcttgttgtcgtcttccttctcctcttccacgctagttggactggtcacctggatgaggacgactttgtcacgccattccgggtagcgctccaggaaaatctcgaatgcctgtagcttctgcgcgacgccgcgaacactgtcgagtcgatcgcggccgacgatgattttctttccagcgtagagcttgcgaatgcccaacacagtcttctcgatatccggagccccaaaggcggctttttgaattgaacgtgcgtcgatgccaataggaaagacatctactgcaacatgggcgccgtaggcatccaccccggcggagttggactcaaagcccaaaacacgtgtgcagcacgaggtaaagtgtcgagaataggaaaatgtttggaatccaatcatgttggcacccaggactccctccaggatctccttgcgctttgcaagacaccggacgaattcgctgcttggaaaaggcgaatgtaagaagaatcccacgtagatattcgggatacgttgccgcagcagactgggtagaagaaataaatgataatcatggacccagaccacgtctccttcttgatattcctgcacaatgcgatccgcaaacaattggttcaggcgcaggtagtcggcccaccaccgtcgctcggatcggccatctgtcgggccatgttgcttgtagtggagtagaggatataactcacgttcggcataacggcgccatctcccttggtctttcagcataatagtctcttctggttcttctgatgcatccgacaaccacacaggcaatacccggccatgacggcctgagctcaattgttcatcgagtcgttctcggtcctgttgggtgacactaattccctctaccagcggatgagcgggtggcttcttggttccgtccacgggaaccggtgcggcagccttgttcaatgcttggttggcaacaaggttactgggggttagaggtgcgactacagaattgggatgtatttgctgcaagggtgctttcatgtccacatcaggctcgacctctccggtccagcctactaaggtgtgagaccaagatgtctcatcagatgcaagatgtgcaaatgaatcgaacagcgccgaagtaccggagcgcgatttgagcgtctgtgatccggtcagccaatacgatctcccaaatagacggagtcatccacgtacccagtctgatcccgatcgaaagctgagcttgtatggtatgcagaaagcggcactgatgagacggccactcaagcgaagtcctgggtgttctaggcgtggatcagtctcgggagattcagcggtcaagcttaagcggcgcagcaaatctatgccggatgatgctctctctgcagtctgcactggctctgacttagtctcagacgggtcggcggttacagcgttggccctggggagattgttaaagtatgaaggggcctcgctcgacgtcttctccagactgggtgtcgcatttgtcgcttgagtgtacgcgtcatttttgagagcctttaatccgggcccaacgaggacggggtttggctggtcatcgggcacctgcgcggggctctctgattcagacatgacgagcagatgagcagatgagcagtcaagcagtcaagcagtcaagcagtcaagtagtcgagcggtgcttatgacgggaagatggaggatgagatccggtatggtttgattagactgtgggagttagactgcaattgttacatgcaccaaggtccggggaaagcttgacgtcggtgggttgaaaatggggagatgatcaaggctacatacctcgggggattaggactgactggataagcaaggtcgggaggggaatgaactatgacagcaaagccatggacgatgtaaagaagatgatcaaaacaaaaacagatcgactataaagaaaggaggaacagggaatagtaaggatggaggggcaagcggtgaagtaaagtcgtcttatcgagagttatcgagggaaatggcctggaaagcgattagaccacttttcaggacaagatcttcgggttgacagtgaataggggaataactagaaaatagaaacagttcgaagacgaagatgaagagagtatggagggggataggtggatatttcctcagtgctacgtcatgtatggatttctttctctttctatgcgctgtcgtatgaggtcctctatgcacttgtgatctagatggaggtttcgatgtagaacattcatccatgcaggtatacatcgcagatataaaaaaacagaacttgttagaatgcaacccctttgtcacatggcggtttcggcctaaggcatacattctcaaatagttcaagttgtgcaaaatacccttaggaacctgcatgcatcctcggcatggtgacatccactccggtgtcctttgctctcttcaaatgccctaagactgttatgcagcttccgagcctacctttacgcatccgtccctctcacctctttcgtccattccatagctctgttgcggtagccaagacccccgatgtctttgccaacagcctgcgaaagaccctagaagcccatcggtccacaaatcggtctcgtttgattcgcaaaatttaccccgttgaagatcccgccggactctggcggcctgagatcccatctaagagtcgcgcggactaccaaccaaccgtggaaccagctctgccggactcggaatattcgccggatactcctgacccggggtctaaaagacgccagaaaaaacgcgcaagtcttgttgatataccgtctcaccaatcactcatcagtcaacgtggagaagatgcgattcaacctgcagggacaggtcgtccggcacagagtccatggttgacaaatttggagctatctcgcgccaatgccgagatcactctggatgcagaaattcgagcattgcatcaatatctgagcctaagagctcgggaacgagaccgcgtagagaagctcaggacagaggtagcttcacttctcaaaacagtggtcccacatgctccaagagtcattggatcccactgcactggccttgtactggcgcactcggatcttgactttatactcccatatgaagacccttctagatcactagaacgtgatcgaagaccaagccctacgcggcctcagatccaagatgcccacatccgccttctgcgtcaagtccaaagagctctacagcacaccgatatattcgacaatgtcaaaatatctgacaagcgaaacccttcactatcagctcgccaccggccgactggactcctgctacaattctattgtggcgaggatatccctgccatcacggagtatctgcaagattatcaggccgaatatcctgccctgcgacctctgtacgcagtaacacgtacactgctagaggcgcgtggcctttttggctcatcgcaggcgagcgttgggccggatgcgctagccatgctagtcgtggcattcctgaagatgaaccatggccggtttcccgggccaaatagcttgggtgaccagtttcttgctcttctacagttctatggtactcaggttgacctcaagtctgtcggtgtcgccgtggatccccccgggcttttcagcacagacatgttgcctgtagctcgcggggctgatgaaactgcccaccagcgcggtcagcgttctctgatcaacgtcaagcggaccgctgcgggaaagctcaatatgcctctcttcatatttgtgttgtgaaaagcagcaccctgcaagccctgtcactcttgatctcctgctttccagtgcgatctcgggttaccctaatattagaactttagcaaactgccgggccgactggtttctagatgtgcaagcggataagccatgagaagtcatatttagcggaactttcttgttgcgcaacgattatgcatacaagaccctacccactacatgaatgatctaggccggtcgtgtactcggacttctgagttacagagtgcatttgcagctgcgtgtcagcagcttcgtgacgcatgtgatgaatgggcaagcgatggcaatatcaagagttcaagtgtccttgccactactctacaggctaattttgatggactagagaaggtgcgcaatcaactcgcgtacctctagccaaaggaagttgtagtctagcggtagatcgagcgatcggctattcaaaataatatcgcctatacatctggccaacacatgtagaactcgctatgcgatgggtctcgtctatagttttggttatcggagtctctttgtggtcactggacaaagaaacactggatgtcgttgtcccctcggatttctacaacatattcataagcaaagcaatttcgattccctctcttagtttcatctttcctcttgaactcagcagcaagacaaaagaacgctgaaggctacgttctcactcgggggtggtgcccatttgattactaagtctgtttcacgcggacgcgacgcgacctcgggcttatcagttcgtggggttttcgtggcagaaaaccgcgacaatcagtcaagactgacgagtccgttcgctatgctagccgctggctttggttgataactatttcttcaaatgtcatcccgcaagcgcgtgcagaagtctacggactccgacgaagaaagcgatgggtccaaccagccggccatgagttcttcagtacgattccagcaagtataactttaagcagagctaagctaacagtcacagagaaaacgacagcggacaaattcagagagctcaacaaactcggaatcttcaacctcttctggcgctgataccaataccgattcacttctagcagtcaacgacgatgcacttctcgacgacgaggacgagctagagctccgccagacccagatcatacaagaaaaatactcgcatttgatcgacgaggccaatgtgcccgccgatcatggaatcctcgaacgcgttgagtgctacaatttcatgtgccatgatcacttctacgtcgaacttggtcctttgatcaactttattgttggaaagaacggtagcggcaagagtgcgatcctgacagcgatcaccctctgtctaggtggcaaagcctctgcgacaaatcgtggccaaagtctcaaaagcttcatcaaagagggcaaggaaaatagcacgatcatcgttcgcatcaagaatcaaggcgaaggtgcctatttgtcagacgattttgggaagaccattattgtcgagcgccatttctcccgaagcggcaccagcgggttcaagatcaagtcagagaatgggcgcatcgtctcgactaaaaagagcgagctggatgctatcacggactatttttccctgcagattgaaaaccctatgaacgtactctctcaagacatggcccgtcagttcctaagtacatcaagcccggctgagaaatataaattctttgtcaaaggcgtccagttagaacagctcgataacgactaccggttggtggaggaatctcttgactcaattgaagaaaagctcagaacatcagcccaagacgtacaggtccttcaaaaccgcaaggaactggccaagaaaaagctcgacatctctgaccagcacgattctctgagaaaacggatcagaaatatccgaggccaaatggcctgggctcaagttgaagagcaagaaagagtcagtcccaccctactccccgctttgatgattgactgacaagacagatggaaatttcactcacccaacaaatcgccgaggcggatcagaaaattgcggagaccgagtctcgccttactaggtttgatgctgcctttgatgaagtcaccgcggaggaaacagctgccggtgaacatgcctggcgagctgccgtggcagtgaatgaggcccaagaggaaagagacaaaatcaaagagaaattggacagtgagatggccggccggcatgaccttcaggtacgtccttcgagtcaccttgaaataccttctctgactgttttttataggcagagcaacgccagattagggaatatctcaaagcggccgagttgagaatccaagaaacccagcaaaaagtcgatgatgagaatcaacggctcgctgatgtgagcgatggtggctacactcgaaaacaagaggagtgtgaacaagccgccaatgacgcttctgccgccaagaaggaatacgaagagcaccgccaaggtgccgctcgcctacgggaagacattgaaacagccaagcgagatttcaccgaagcgaaaggtccgcttgaacagaaaaaacgcgagattagtcaagcggagaaccaacttcggaacctcaccaaagaaggtggatcgagacaatcgggcttcaatttcaaaatgccggcactcctcaaagccattcaacaggaacaatcatgggaatcgcgccctgtcggcccaattggtcaccatgtcactctgctagaaccgaagtggtcatctattttggaaagagtgtttggtggcacgcttgccagtttcatcgtttcgtccaagaatgacatgaaacttctcttcgacatcatgcggcgtgtccagtggtaagttttaccaggggtcctatattgaaactgaagctgatctgacctgacctgatagcaattgtccaatcttcattggctctggtgggcgtttggacacctcagcacatgaaccagactcccaatacaagactgtgttacgaacacttcaggtagccaccctctcccgttccacgattcatggaacgtgctgacctttcagatcgacaatgaattagtgaggcgacaactgatcatcaaccatggggttgaacaaatgctgttgatcgaagacgtaaaggaagcctccgcagtactattcgacggtgcgcgaccaagaaacgttaagcgctgttactccattgacgcaaaagatcgacgtcgaggaatctatctctcatacagccgagccggagaaccgagtcaggctcctgttatggggtggaccgatggtccgcgcatgaaatccgacgtggccttgcaaatcaagtaagtaagcctccttccccgaaacctgtaacagtggctgatggctctagcgcacaacgcgacatcattgccgacctccaacgccaacagaacgacatcgaacagtcattggtaactgcccggtcacgcatcgaagcctgcaaacaggcattggtccgacacggaagaattgagaaagatttgcaaattcaaatgcaacgaatggaagatcatgccgaggcacttagagacgccttggataaagagaacgccgaggatggacgcattgatgcccttttagcagcattgaaggaagccgaagatgaaaagctgctcaatgagggatcatacaaggatagtgaggcagccatgaaaaccacattgcagactctcaaagaaatccggcgagaactggccgccaaagattctgaacttggaaccctccgagaaagactacaagttgctgaaagcgagcaaaatcttgtcaaaacgaaaaaaacggaaactctcgacgagaagaacgaagctgttggacttattaaccaagataaacagaccaaggctgaaatcgaggcgagaaaagaagcgataaaagcacgggttattgaatacaacgaaaaggccaacttagtttcttctcgagttcctgtggacgaaggagaaacacccggtagcctcgacaaaaagcttgataaattaagccgtgatctggatcgttacaatttggagtatgtctcttgcagcttagcgttagccataaaactgacaatccataggttgggaagttctcgagaggaaattgctgctgaggcaacaaagactgcagcaacttatgatcgagccttgcagcaacttgatcaattctcggccttgagtcgggtaattacccccttgttttgttggtttctttggtctaatctaatattcgttcaggccctgaaagataccctccagaaccgtaagaagagatgggaaatcttcagggcgcacatctcgtctcgagccaaagcccaattcacctatctcttgagtgagagaagtttccgttggcgggctcctgccnnnnnnnnnnnnnnnnnnnnnnnnnnnnnnnnnnnnnnnnnnnnnnnnnnnnnnnnnnnnnnnnnnnnnnnnnnnnnnnnnnnnnnnnnnnnnnnnnnnnnnnnnnnnnnnnnnnnnncggcttctggccgaccatgccaacaaacttctggatctacacgtaagcctgttcaccagaaccccagaatagaccgatcaatgctgactactgtctaggttgaacctgatatcaccaaagatgatagcaccgggagagatgcaaagacactatctggtggagaaaaatctttctcacaagtctgtctgttgttgtctctctgggaagccatgggatctccaatacgttgtcttgatgaattgtaagttttgttcatggtatggtttgggtcttcatgctgacttcgaaagtgatgtgtacatggatcatattaaccgaaagatggcgattgacatgcttgtaagtgtcacttctctttcctagggctctttactgactgacgaatgttctagatggttgccgctagacgatctatcggacgacagttcattctgatcacgcctggtagcaagaccgatatcaccatctctgcggatgtcagagtgaaggagttggcagagccagagcgtggccagacgacactaaccttccggcgctgaactcgtcaattctcggttaatcttatttgcagcgaaatacccttaggaaatgccatgttcttgccatattttaaattagttccacaccttgtgtcatgaataaaatcgtagttgtagtcgagtgacacgtgaccataaccagaggaacgtttagcttcactctttacctcaaacctcttcgctccccgccatcataatctcaacatctcctaccttcgtaccttttttcccctatttgtcaacagagctggtttataccattctttattctatctgtgaactcccccagctttggcatcaaagatctttcttggttccacacagaagcttcatatcattgaatacctgatctcccatttcctccaacccgaccttattggtttcgacgaatatctctcttctcccctcccgtttccgttacctcgaacctctgccaaaacattcctattctaacttccgcgcaaccatttcacacaccttgatcgcaaacaaaatcggtcacctcacttgctccccacctccttagcaccttatcgtcacaatggccgacgcgcttgctgcacaactcagcaatactaagctgtaggtcgatctgtttccttagtccctaaaacaaatctgactagaccagggaagcaacttcagagcaaaaactgcaggacacattgaatctcccccccaaagatactcgcccacaaactgaggtgaatatattgtgactgccagtcaatgctaaatactgactttgactaggatgttactgccactaaaggcctcgaattcgaggacttctacatcaaacgtgaactcatgatgggcatttttgaggctggatttgaaaagccctcccctatccaagaagagacaataccagttgccctcacaggcagagatatcttggcccgagctaaaaacggcactggaaagactgccgcctttgttattccaactctcgagcgcataaaccccaaaagtacaaagacccaggccttgattctggttcccacacgagagctcgcactccagacatcacaggtctgcaagaccctaggcaaacaccttggtatcaatgttatggtcaccaccggtggaactggcttgatggacgacattatccggttgaatgaccctgttcacattcttgtgggaacccccggacgagtattggatttggctagcaaaggtgtcgccgacttgagcgaatgcccgacatttgtgatggatgaagcagacaagttgctgtctcctgaatttactcctgtcattgagcaacttatgtccttccatcccaaggatcgccaggtcatgctcttcagtgccactttccctttgattgtcaagtcatttaaggacaagcacatgcgtaacccttacgagatcaaccttatggacgaacttaccctgcgtggtatcacccagtactatgctttcgttgaggagaagcaaaaggttcattgcttaaacactcttttctccaagcttcagatcaaccagtcaatcattttctgcaactcaaccaaccgagttgagcttctagccaaaaaaatcaccgaactcggctattcgtgcttttactctcatgctcggatgcttcagcagcaccgtaaccgagtcttccatgacttccgcaatggcgtatgccgcaacttggtttgctctgacctgttgactcgcggtatcgatattcaagcggtcaatgttgtgatcaactttgatttcccgaagaacgcggagacttatcttcaccgtatcggccgttcgggccgtttcggacacttgggtctcgccattaacctcatcaactgggaggatcggttcaatctgtacaagattgagcaagaactaggcactgaaatccagcccatcccgcagaatattgacaagaagctttatgtctatgattctcctgagaacatccctcgacccatctccaaccctccacctcaaactggagctggatccgtgaacatgaacggagaccgtcaacctcgtcggaacaacaacaatgggcaaccacagagtcaacaacagggtcaacagcatggtcaacagcatggtcaatactacaataatcgaggacgcggttcttatcgtggtcgtggacagggccaacgtcgtggggcacaaaatgacgccaaccggattacctttggtcaaccaaatccgggtcaaccccaggcgcctctttcttaggcccggacacgcctgcacaacacttttcatatcgctgcgctttggtttcctcgattctcttattctattccgctctatcttcgagatcttgtcgggctatcccggcattgattttccggtcataatgatacgggagtgcaatgtatcatatgtctttttccattcaggtcccttgtccaatgagttggatccttgaggaagatgcattttcggcgcctacgctcttcgttttccgaggctgtattctgtgtttcaaggacttgaaggatttgcaaggatttgcaagggcgttctacaggacaagcgtctcatgtggcttttttcccccatgggctcctttttattttcccgacgcaacgagtgatgatctcaccctttaccaaccttttgttggcagcctggagtcctcccaccactctaccatgcttaacctcattcctgcctacgctcactttgtgtgattgccgttgtcaatagacacggtgcacacaactctcccactctcccactctaaaaaaaacaccaaaaaaagaaggaaaaaaatggaggagcactagttgtctaacggatctatttatatcagctagtgaattgacaatatccctccaatttgttccactgtagtaagttgtaggacctcgatgcagtcttcgtgtgtatatattattcccatatgaatgcgttttgtaaaggaactggtctcctacttccctggctgattccactgattccatagatccatcgactgcgggaatggcacgtgccgagggccgtatattgctggatctccgagttcggcgaccgcaattcctccaaaccaccaaaaagaaaatggcgacggtgaataaggatcacaagggaaaggtttgttctccagccaaataatacagtccacttgaagctcaccaataattagcccagtgcccttcgctccatccttgcggggtccaccgccggagccgtggagatcggtaaagagctcaatgacccctaccaggccgctagctaaccgtatactgcagcgatcacatacccggccgaatgtatgaccctttgaatgtcttccaacgatttttgctaatgctacgaagttgcaaagacccggacgcaactcaatcgccagcttacccacggccaaaagctaccatggccaccgtttggaagccagtggtatgcaggatgtacaacactgattatcggaaactcgctcaaggccggaattcgtgcgtctaccttccgcgattgtctggggcagcgctgatgtatactaggattcgtcgctttcgatgccataaaatcggttctccaggatgagaacggcaaaatctcaggaccaaggacggttgttgctggatttggtgctggattcaccgagtctcttttcgccgtcaccccctttgaaagcatcaagactcaattgtacgttttctgtcctatttctggctagctctactgaccgaattataggatcgacgaccgaaagtctgccaaacctcggatgcgtggttttttgcatggtagcaagctcattttccaagaaagaggtgtcaagggtttcttccaaggctttgtgcccaccacagcaagacaggccgccaactcagcaacccgattcacggcctacacaacattgaagcagcttgcagagggctatacggcgccaggtgaaaagctgggcactgcagccacatttggaattggtggaattgcagggctcatcacagtgtaggacttgatctctaaagacgatgggcaaaaagacacatccaagctaacatgactcagttatgtgacccaaccattggatacggtcaagacaaggttagcatccccacgcgcgctaatggtatatataaggtcctaactatattagaatgcaatcaatcgaggccagcaagcattacaagaacagcattgtttgcgcaacaagaatcgtcaaggatgaaggtgtcctcactttgtggtctggcgccatgccacggcttgcgagattgatcatgagtggaggaattgtgttcactatgttcgtgaccaacccaaatcgtactatgaatgttgctaaccgctgggcaggtatgagaagactatggaagggctggacatcttggatccggagcgaaagtatttgtagaatatcaatacatggtatctctgtacatcaaaagaacaactctgctatttactctttgcgtttgccatgtcctcggcaaccatggcctcaacttccctatcggctatccaagcccgcacactgtccatcacggtatccaaaccatcaccgccatcaagaataccatccagattgtggacggtgatacctgtacgatggtcggtgcagcgactttggccaaaattgtaagttcgaatcttatcacctcgacccattttggccacaccacccaatatacctcgtctgagctgcataagctcttgctcacgagcttcttgccgggcttcggccagctttgcccgtagcatctgccacgccttcctccgattggcctgctgggatcgttcatcttgcatggagacaaccgtatgagtagggatatgagtcagtcgaatggcggactcggttttgttgacgtgttgcccaccagcacctccagccctcatcttctcaacccggacctcttgcgggtcaatatagtaatcgctgctggggtcttcaaagttcatggcactatccatctcactgccgtcctctgggaaactcggcaagaccattacgctgacggcgctagtatgggtgcgacccttggtctcggttgcggggactctctgcaccctatgtacccccgattcagtccgtaatatatcgtatgcaccattggcttcaatttcaattaccgcttcaatgagacggtcgtcggacgcgccgacctctgtgtcctgcttcaatattgttgggcggaggccccttctggagcaaaaggcaacgtacatccgtaacatctcaaaagcaaacaagcctgcttcatctccacctgcaccgggtcggatttcgagcaaacaaggaaggtctgcaaatggatgtcgcggaatgagagccttcttcagtcggtctgatatcgtaggcaaggtatcgcgactgctctcaaggtcttctgttgccaaagaccgtagttcggagtcagtgtcggggtcgtttaatagggatttgagctcgacgatagactaacggagttagtagggctccaacaaagcttcccaaggcgcttacatcgttggcatggacccattctttcaagatatttgcaaccggtgccagttctccggctcgtttggccgttttcgcatcaaaggattctcccaatcgctccgcaagctttgtatgttcatctgcaagtagacgtgctctgcttaaaagagctggagacaaggcataatcggatgctacgtcgcaatttagcattgatcagaaaataaccggaccggtcttaccggtatgtacacctcgcaagggagacagtttcagaccaagcctaggccgcaagatatttcgacatattgacttgacgagcatacttcgagtcagagtgtgaagaccaagatccggagcgaaagcgattggagataaattccatgtcacatgacggtaacggatcaatacgaggcgtaaaggccacggagtatgctcatccaacttccagtttcttgttcattgttcattgcgctttgtacttttctcttttggcctaacttctttggattatgcccctcttcttgtagtcctagggagactgattctacaccaaacccctcatttacatatccattactgcattactgcgtcgcatacccccgagatgctcgtttcattggaattattcacggcctttctggcttgtgtctcggctggatatgcccttcaaatatcgccagatacgcctctctccgaattgatctcttccgccaaagcccacctcgcgcagggctcaccccgagatgccgtggtatacttcgatgccgccgtctcgcgcgatccaaccaactatatcaccatcttccagcgcggtgcggcttatctatccattggcaaaaactcacaagcctcaagtgactttgatcgagttctagaactcaagccagactttgagggcgcccttctacagcgatcccgcttaaacgcacgctccgcgcattggcaagaggccttgcaagatctcgagcgggccgggaagaagtcgacggatgattacaaggaactagaagccgcacgggatgcggccacattggccctcaatgctgaaaagcaaggcgcctgggacacgtgtgtctcggaggcaaatgtggccatcctaaaggcaaatacagcactgcctctgcggcaggctcgagcccattgtcattttgaaaaaggcgagacggaggaagggctcagcgatttggcacatgttctgcaaatgtccccgaacttggtcgaaactcacctacaaatgtcgtccatgctgttctactctctaggagacagtgaccgtggccttgctcaaatccgtaaatgtctctataccgatcccgactcaaaatcgtgcaaccggctctatcgacgtgaacgaaagcttgccaaacagctagaaaaattgcatactgccctagactcacgcaagttcagcaatgcagcaaatctcatggtcggcgatagtgataccagtggactgatcgcagaagtcaaggccgatattgaagaagcaagacaagttaaccatattcatcgcctggcacccaataatctttacacattcctagtcgagaagacctgcgaggcttaccgtgaagtgagtgcccactacacatggcttggtttctgtcactaacatagccagatgcgtatgatcaaaaaggccggtccttactgcaccgaagctctccagcttgttcctcactcacttgccgggctcctctataaagcccagattgctttggacgaggatcgattcgaggacgccatacgtacgctcgaatcggccaaggaacaccaccccggttcccaagaggcgcaatctctccaacagaaggctcagaccctactcaagcgttccaagcagaaagattactacaaggtccttggtattagccgtgatgcggatgatcggacgatcaagcgcgcgtatcgccagctagtgaagcaacatcaccctgataaggcccactcccagggtgtaagcaaggaagaggcagagaaaaagatggcggctattaatgaagcctacgaggttttatccgaccccgaactccggacacggttcgacaatggcgacgaccccaatgattctgaatcgcaacagcggggcagtccgttccaaggcaaccaattcggtggtcaacagttcttcttccaacagggtggtccacagttccagggaggtttcaaattccctggtggattccgctgatcagattgtcttttgtgaaacataccaggtgttcgtggagtttctcgatgtatttgggaagctatagatcttttgaagcccgcatgagggataggtttaggaaagcacatgaactgatattatttctgttatttggatcgaagtaaatggtttgcaatctcatcctcgtggagcatctgtcaagggcacgtagctcacctggaagaccttctccctgtgaatggatccgtcttcctttttatccaccacccagatatattgacccccattgggatcaatagcaccctcgctgtcttccgattccaccgggatgaatagtctcccgggagcacgtagctggtccaccagagttggatgaagcttgtcggctgcggcgccaacgtggatggcgtcgtagggtgcaccttctttccatccaagacgtccgtcgcccgtgataaacttcacggtgccgttggtctggaacgcactacctttcttggacttgttcatgttggaacgagccatgtctgtcagctcggggatatggtcaataccaatcacctgtccctgggcgttgccggatgagctggtcaccaaattggcaatgacatgggtcaggtatcctgagccagatccaacatctaacacccgggcacctggtttgagataatcaatcagatactcacatgcatggccatgcatgtgcggtgctgatatggtggccccgtatccaatgggttgaggcgagtccgaatacggccgtgatggagcataatgggctcgatcaaccttggtcatgttagaggtgacaatgaatcagatatatatcaatatgctcacgcctatcatggcatcttttacacgctcattctggatcagtccggccttgaataggttctcgatcaactcggtgttggtagatccagaacaataccacgccatggtcatagcctgtgttgctttgtggatgaattttggtttgtatggactaatcatggactgaatgggtgttggatggtgaaagagagaagagttactgtccaggtatgtttggccaattacatagtatgtacatgtgtgtgactatatataaatgacgccatgatatctacattttcacacgtgatacctgaaatagtcacagttgcagtaaaaactatcccactaattcatacagtctataatgttatatctagtcaaactaaatttataatcctaatataccagaagggaatgcgtgcaatcacacgtagaatggctacagagtaccaagtcacgtgaaagtgatatcaaaacatcttacaggtccgtggacatcgccgactcatcgcgccgactacgcgcgttgataaaatcgccgtgggaacaattacacttacagggcatcatggacctctataggactattcacatacccctcatctgatattctcccctggcttcagccatcagtattgaccttcaaaatggcggaccgaggccctggcacagcagcgactgtggatctgctgattctcgactacatggtctgcctatgtatcagcggactcctagaaggtatttcacaagcaagagcatccgaggacattgaatactttgcgctttttgttgaacgtaagcaccagaactgccagcaatggaccatgcatactgaatatggctctagagctccaccggcggcttgccctccatcacctcgaaagccccctgccctgggacctagatttcaaattgcgcatcttctacatgtccaatctatttctccactggtacccccccaaagactacgacatgggtccctttgttcctctgtctgatatcgcagtccatttcttggacctatgcctcgatgcagtcgcccacgtatcccggggacgctggttcgacctcggtgctcacttcatggtccatgcgatgttagaagaacatgcgcgtttccccgaccagctagacgcactctgcaactggagaaccaacgacagtgaactcgatatatggtgggaggtcagccgtaactggttccttgggcacatgccacccccatttggtacggcgggtccaatgagccaagcagagattaatgaggggtttcccctccaagcactgcagcatcgttatgtcgagttcttcgaggacctcatggatgtactggatgtgccccttcttcttcagctggagcaaggtcagctggaaggtttgactcgggaggagacccgacaggttcgagagtattgtggaatttaatcttcctctacacaacgatacgagaaaatgcctttctatgtgcttccatgtgtaatgacgccaagtcagacacgtgaaggatcatgagttaatgcgcaacaccacatgtacactaactcgatcatattgatcgttcaatcttgatcaattttaaccaattcagatcgaaagccaatacacacataagacaggaatagtacttagagcccactacaagacccttgacatggcatttataacttggaacaataataatttacaaagggcgcaaggccgctctaggtacgagaacacaaacaacaaaaggcgcgtgacaaacactcatgctacttagccgagcagcatgcgccgggggtcctcaatgtactccttgacctgcgatgggattagtgattgattcgggcgaacgaggaggtagacataccttgacaaggaaagtaacggcctcacgaccatccaggaggcggtgatcgtacgtcagagccatatacatcatctaaaaatatcagtaaaccgaagaatgtgattggggttcctgtacgtacggggcggatctcgacattgccgttcacagcgacaggcttctccttaatggcgtggagacccaagacagctagacaaaattagacctgaacctcaaaaatagtacgagggagctcacctgtttggggagtgttgatgattggtgtgcccatcagcgagccgaagacaccaccctgggatgagttagccatgttattgtgaaacacacaaagagacgaaacatacgttgctgatggtgaaggtaccaccggccatgtcttcaatggtcaacttattgtcacgagcctaatacaagtcagtaagttggacaccccctctagaaaaacaactgctcaccttctttccgagatcggcaatggccttctcgattccaatcatatccttgccttcactgttacggacaacaggagtcacaagtcccttttcggtggcgactgcaacgctgatgtcaacgtaatcgcggtagacaatggtgtcaccgccgttaggaccctcaatagaagcgttgacagcggggatatccttcatggcaagcacacaagcacgggagaaggcgctcatgaagccaagcttcacaccggtcttcttgagagtatcttccttgtacagtttccggaactccatcagcgaggacatgtcaacctcgttgaaagtggtaagtgaagcggcggtattctgggactgcttcaggcgctcggcaatacgcagacgcatacggttcattttgacctagaccaaaattagcttaagcttaaaccaaagtcaaaggcccattggcggtcaacttacccggcgttcctcgcggttaccaatagaagctggctgttcggcagcttggggcttaggagcttccttgggaggcgcagccttcttaggttcaggcgccttgggcttctcggtctcggtgggggcgggcggggcctccttcttaggctcaggctctttcggctcaggcgccttgggttcgggctccttgggcttctcggcgccctcgtccttctttccgccttcgggagcggcgccaagctcgatcctgacgagatcctggccgacagtaacggtatcttcctcgttcacaaggaactccttgataacaccagaatccggggcattgaccgagacatcaatctgaacagaaaactcacgttagcgacagtactagttgcgagagacggaagcggagttggtatttaccttgtctgtttcaattgtcgcaatctcctcgtcgcgctcgacgaaatcgccaacctctatatcagaataagcaaatgtcaaaatgttcaaccacagctaaagcaccatacgttttgagaactgcttgagggtaccctctgtaatcgactcagccatgttggggaccttgataatggagtcggctaagcattattagcaattgaccaacaagactgcttaagaaaagcatttaccataggtgcgaagctgatggcctcccagaggagcaagattgagcctcgagacattgatgctatagggttgtatgagccaaaattgcgacagacagtaatgagattcgaatacttacccggaggagacctgcaacaagcccgaagctgagcgagccgaagccttccgcgtaagggtagacaatcccttgacattgcggaactggcttgctccccgaggagcggttctggccacagccgagaagcgttggcccgagaggcgcgcaataaagattcgagaagccatgatatgaattaaagcaaactttatacttgaaaaaaaccgaagcggttatgtaggagagaggaagaacttcaactctttgaaaattagagaaagcaggaaagatgaagctcggattaggtcgggtcaaagtaaaccgggcacccttccggcagaggcggaccattattctctacggggacgggcagtgaccatttgagcaaatccacgccgagcgaattaggaagcccagaatagtcaacctgacgacattgaagccctcaaccccaacccattgtctatcaggagccctaacgatctccaaggttgtcatacctgtttatagatctgtgtatcaacgtacacctttcttgtttccctcttcctcttccagttggccggaattggacccgggacaaaacttgagcacaatgtccacctctgctgttaagtgagtaggccggtgtccccctagtggactgttcactgatctactctaggtcgctctaccggcgctccctgaaattgtcttttgactgggccgtccaccggcagctctggcgtggacaagcagtctatatccgatcccttttcgacgccaacaaggacgtccgcgatcctcgccaacaacaagtatgtaaaaccgcaacttatggctggcaagcctaacacatgctctaggttttgttgcgcgagacagagaagctgttggagacctggaagcaccctgacccataccacgcacctactgcgcctggcggcaacaaatgggagcgcaacctgccggccccaatcctgccatgtatgttcatatcccccccccccccccccccccccccccctccacccaaccctcnnnnnnnnnnnnnnnnnnnnnnnnnnnnnnnnnnnnnnnnnnnnnnnnnnnnnnnnnnnnnnnnnnnnnnnnnnnnnnnnnnnnnnnnnnnnnnnnnnnnnnnnnnnnnnnnnnnnnnnnnnnnnnnnnnnnnnnnnnnnnnnnnnnnnnnnnnnnnnnnnnnnnnnnnnnnnnnnnnnnnnnnnnnnnnnnttcataacccccccccccccccaatgcaacattggatttgcactaaccctgaaacaatatagatgcccaacctcccggtccacactaagtaatatcgcaaaacacaatgaggattgggccaattgcaaacatgaaatgatgcaacatgaactatgcgtatcttccttgcaaatgtagagtactcaaatcagaatctaaaataagcaatttcgttcatgtacaatagccaccacgagagcaacaagtctccaaggatcgcgtttatatgtacaatgtatacaggaagtacgaaaggcaatatagtaaactttttcttaacaattgaaatacctggagttttcattgatttgggctcatgcccagagctagtatccgaaagttgaaatccctcaagcgagttaaggtcgtcggtatcatttcatgtccgtagacataatgtacaaccaggaaattgatggaagaaaaaaagaaaacgcagagccataacgtgcccgtcccataaccccattatcgtgtcaaagaaccaatccgcgccggaaaagaaagcaaacaaaacccgcgaaaaaaaaaagaaacccttacagctcctggctgcccttgccggccttgggagtcttcttggggagaaggtctgagattcatgttagcatggtggaaaagaaacgattggtttgagagagaacgtactctggtgaatgttggggagaacaccaccctgggcaatggtgacgtgacccagaagcttgttcagctcctcatcgttgcgaatggcaagctggaggtgacggggaatgatacgggtcttcttgttgtcgcgagcggcgtttccagccagctcgagaatctcagcagcgaggtactcaagaacagcagcgaggtaaacgggagcaccggcaccgacacgctgggcgtagttgcccttgcgaagcagacggtggacacggccaacggggaaggccaaaccagccttggaggaacgactgaagatgttgatgtcagtatgaaacgcatatgtaagaagcgaaatgtaaacaactcacgactgcgcgttcttgctgccgctagccttgccgccggactttccgccagtcattttgatggttggatttgaaaaagggggggttggggaaagaaaagaagttgtttgttgaagatgaaaagcttgggttatggtgtaaagtcgcaagagcagttgggagagcgtgtggaagcgaaggacctttataaggacgcggtgagggtgacgttgggacggcatcaatgggccctccagatcacggcctcgcttagacattgtagccaatgatcaatcagatcagaccttccgctttgggaatgatgtggtaagataaggccattaccataccggacagtcagctgactgtgatcctaccccacctttcccgtctttcccaccttaagacgcgtcaatgtcggtttaatcatacagatcataccaggctcttaccgtattgaaattcgtcctcctttgcaccccctccaggatcaactgacctttggaacacgagtataaagacgctgtctcccctcgtcaccgcgtctctctaacttacccttccacattccatctctgtttcccacccacacgcttcatccatctttacttcaactcttccaactctttttttcccaaccaaccttttttcaaatccacattcaaaatgccccctaaggccgctgagaagaagccctccaccggtggcaaggcccccgttggcggcaaggcccctgctgagaagaaggaggctggcaagaagactgccaccactgccactggcgagaagaagaagcgcggcaagacccgcaaggagacctactcttcctacatctacaagggtgagttgattcctgaacgcgacatcagtcttcaaagaaaaaccacgcgtccatactgactccattttcagtcctcaagcaggtccaccctgacactggtatctctactcgtgccatgtctatcttgaactccttcgtcaacggtatgttttcctcttcgcgaaatgcacgcgtttacgcgttcttccacgtcacgttttctaacttcattttccagacattttcgagcgtgtcgctaccgaggcctccaagctggctgcttacaacaagaagtccactatctcgtcccgggagatccagacctctgtccgcctcatcctccccggtgagctggccaagcacgccgtctctgagggcaccaaggctgtgaccaagtactcttcttccgccaaataagcggtttctttacgttttctttccagcttgcttttgtttttactacctcttgatctgttatgggctctgaggtggtcggttatgggtgttttgcgggtttctaatgcgtcatgggatggcttgaattttcttttccccgatgggtgatttttttttgaatggttaccactcgatacgtgaatgcggtgtaacataactcgggtctggggcaggcatggattggcctcccctactagaacgcgaaattccaaatgcttaattgcattgcatcatcattctatttctctttcctggtaaatgttccaagccaactaaaaatgaacatgggtgcctttcatctcatggtttgtctgttatcttactccatctcatctgaatcatccagcgcctcaacttcatccagagcctctgcccgaccatagccatgatctggctgatgctgactggggaagatgtgcacaataggctgtccaggcgtggattggattcgtttcttccagtcggcccaatcgtcttcgtccttgataagaaatccaatcaacatgctggggtccatgtccttgatatggattcgccgtagtcggccggtgtaatagctatccaattcctctttggtgtagagcccatctggtcggtatgatgttgcaggtcgggtggtatgcgggtcaaggaaaaagaggtggcagtcttgagcagccacgaaataatgcgatgccgatgggcgtccgctgtcttggtcagcacacgctttatatcagaacagacgcatggacctaccctgcaatgccaacggattggggatatgtcagtgcggctcggagtccatcccaatacgctggggtgacattatcgatccccagcctagttccaatcaagatgagcgtgggttgaattcggcctgatctatcgtgggccacgtgtgcaaatttgtcttcatagacgtccgatgtgtcattggttacatagaccctgagttggggggcctcgctttgatttgaaagtagcctatcaccatcagcatcactctatagctcgagttttggcaacactcactggatacatttagcagttgccgatggcccaaaccattcgcctgggtatttcccgcatgattctgcaccgcgatcgacaaattgatgtatagagaatggagcatcgggatgatcagcgaacatcgatattagctttgactcctcctccactttctcccctcgacgccagtctagtatatctggttagctcttgttgtggtgtattttgggggcgagggtatgatcggaaggatctctcacctcgtcctagtagtaaaactgaaaatgtgtttgccaaaaggctttgtccagatctgatcatgcagccccaccctgtatctgatgtaaagccttgggggtccatcagctgacttctcagacgtactcccagtgtcatcgaggatgttgcttctggtgtctttgttcgtgggattggtgtaaagtttgatcgatatgtgatccatattctcgatccaaaatcagagagaaaggccttgggccattctgtgtcattcaatatgctagcatcgggctcttctggggagctgtgtgggttgttggctatatgggatattagaaggttggtcttggagttatatcttcacttgagcaaaactcactgtcctggtcactgggtggttgcgggggggcatactctctgcctaggcaccatattgaagctgcaggtatgtcatttctgggttctgggtcccagaagtattgtactatgcgtttgcacttttccatgtccacggtcatggttggtgctgtttttctgccgtggacttgttgtagttgagggtaggtgagtcaatgttggaggtcagtcagtagtagattatatatatctcctggaagataacccagtgatttgaaaaccaagtgagtcaacccaggtcaccataagaggaaccgaggaaaaccccaaaccaaaaataatagagatacgaatgacaaccagtgaaatatctagacaaaagaagttggatcttccctttctcaggacatacgcaggtgagggggaagtcttccgtcacgagccaagacgtcaccgaccaactcctatgtatgcaatgagtgtgtaagtctgcactctatacatttacatttacacttgaaattgtcatttgaatattaataaaaacaattaaaaaacaagatcattcttatagaatcccctatattattgttaccctttgtagaatatctgtcaccgcccggacccaaaggcaaaagaatgaattcccccgtctgcttatttttttcccatcaacagttcagattcaccatcacctatggcccgccatgggaaattcaaggcccgtagcaggcgggcaccaccgtgtagaggtaaccagtgtgctcctgttcttctgatgaatactaacttattcaagacccaacgccacaccagtttaccatgcaggaagaagctcagaacaccgaaacccatcagcgttcatggtcagatagcaaccttcgtcacaaagctgttcacttcgtgagcgcaggaagcttgaagccgacattggaacaagcagacgaggaccagacaaaattggacacggaccgtgaagaaccgaacaccgacaacacaccggacaaaaagaccgacattgaggtctcgttcttcttcgactcaaagggacaaggagtttttcatacagagcacccagacccagtattgcagtccaaattatcggacatagacgactcgagtgaagatgaggttgtgttcaccggccgcaggaggaatacaaaacccgttctcatcgaaacgcatcagaacgagattgaagaaatggtgcagacgaatactgttgcatttatgcagaaaccacagacaccaacattggactatacgtccggggacccctcgcccgccgctacacctacagacagccttgaatccaatacagagagaccagactggccacagaaagaagagaccgacccactagccgactatattgccaacatcgacaacgactaccacgaggtagtgacctacagtgcaaatcttgaactagaaggtggcattgacgtcgaaaaagccgcaactcaactagacctgtcggcttcaagccatacagggtccaaaattggatcaccaagatcactagctcaaatgcaaattgacatcgaacatgattcaatttcaacatcaagcgaagacgacgaggacgatatggtcatctctggatcagacgaagacacacttgaagattttgtgttgctggaggacctggcgaatggatattctgggtccaccaagaagggttcccgttatggaaaaccctcatttcaatcggcgtcggcactggcggatgctcttgagtccgactcgtatttcgggtttgacgtaatggactttgaccggccaagtctacggaaaaaaaacaagggcaagcaagccatccccggctcggtactatcggatagtgaattcgagctacatgaagtctggcagaacgaccggaccaaaaagaagatacggaagatggagcgggcagaactccgagcgcaaggactactgggcagaaaagctgggaacccagacctcaaggtcaagtatcccaaggaaatgaacatggaggaattcatgaccgagattcgctcattcctcatgtctgccaaaaataggttcgttttatatctgctcattctcattcacctagctaatccagtatagcctgtccttgccgcccatgaccaagcaacgcagaaagctgatacatgaactggccaatgcgctgaacctgaaatcacagtcacgcggcaatggactctctcgcttcccggtccttaataagacggcgcgcaccccgcgatacacaccaaagactatatctaacgttgacgagctcttatccgggaggaagttcaaccgtcggttgttcaaatcatggggcacggaagtgccaaaattcccccaacccaagcgtggaaagtccggtgctgcttcatatatggatggcgatgtggttggtgcctctgctccagaaatcggagctgaaaaccgagggcgggctatgttggagaagatgggatggagtacaggtactgctctgggtgccgccgacaacaagggaattctgcagcctgtcgcgcaggtcgtgaagaactcacgggctgggttaggttagatctttggggttgtgtgtggtaagaagaggaggatttccagccggcatatgcggcctcgttcaactagagaaaatataaatgtaagactcgacggcaccttttcatcttttcattatttaaagaagaaaaaaagaagaagaagaagaagaagaacgggaaatgagcctcacctacgtgtttgttcctagtgttttctccccttcttagcaagagaccctttcaaaggttgtgcgtgatcgagatctctaatatgatcgaataatttagacttggatgtaaacggagcctggcaatttgcacaaataaacccagtgggttgatccgcttgtcttgcggcctttttcgcccgtttctgcttggccttgcccattttgagagttggtgactgctcggtgaggtccgaagagaacggacgaccagggatgtcagaggagtctccggcacccgtggacaaagaatccatgtcggtgcggagtctagtctcgacatattccctggaggcataatcgtcatcgtgcgaagacgttggggagcttagctcggaaagaggaattgtttcctctagaccatgtgaaatttctcgatcctcagcatcaatgtcatggctctccaaggaggcatctgataccacatcgacctccgaggcagcagaaaccttatattccccgacatcaacgtcgtcaagaggtttagttgcaactgcattggtacccgagtcatcagcagactccaaatccaattcatcattctgcattcgcatctcccagcatagctgtttgactgccttcaaatgcttcttgctacgttcgtgcgcctcgaattgcttctgacttttgaaatatttgtgacatgccacacattcaaaactctcgacttcgctctcttcgctcctctcctggtcgtcatctgccaccggttgctctgattgggcccactcggggaggacatgatcccgcatcctggcttgattcacagctcgtgaccttgcagcttgtgcagccacagactggcggagggtttcttggcgttgagcttcactttgggcgttgactttataccgcgggtcacgtttcttgacaaaggccacgagagacctgacagcatcgttaaattctcggatgccttcctcccgaagacgtctgttctccttttccatcattcgtcgtacccgacgatcaggcgcttcagaatagcgatgagcatctttccatgcgaatgatttttgggtggaaaatccggtccatgcagcatagaagggtcgcacaacggtctcaaaatcatcgtcaccagatccaaatgatggatattcaataggatcttgattctcccactgacaggccaatctttcttccaccacgagctgttcgaattgctctcgtaaaccaccaaagaatccggttggggagtcggagaattccatttgaggactgaacttcgaaaaaagtctgaggacatcttcagctgttgtaatccgaacattgtacgagtgttgatcgtcggtgtttccgttggtccctaaaaatgcatcgctatgggagtcgtaccatgcccgttcctggggatctgctagtacttcgtatgcagattggatttcggcgaacagcttagtagcctcgtcaacattcccgtaatttcgatctgggtgcaatataagagctttttttcgatatgcctttttgatcctaagagttcgttttagttatgtccgtaaccacatatccacatatccatatgaacttactcctcatctgttgcaccgcgtataacaccaagtagctcataatagtcggtcttctgctctgtctgttctgaagcgccagagctcgcctggctagtggaatgaaattggcccatggcgttcaaggatgaataccgcaataatcaccggttgtttttaaaggaacttagtaattcattccaagtaccccaagcaaatcattgggagcatagagcgagagtactgtctcaagtgtccataagcagaggaaaggaagaaaaaaaaaacattgcgatggaattcaagggcttggcgccttcgataacgaaagcggggagaaacattttctcaatgacttttgtattttcctgttctcctgttctcctgttcccctacatgatcccctgagtttctgatctacctttttaatttgcttctttaccttcaactaccgaggaatgtaaaccggttgttcttccgttttgattgccctctccgttggtcttctccaatatcgtcaatattcctccagggatggttcggtctttaagccatcttccagacgagatcctgaattcgattctacgttattcttctcctcagtcttgcgccgccgtcgaacaaaccaacagtcgatttaaaaacgtaacgaatgagcctttactatggcgtcaccattgccagtcgcattacaaattctgggatgggcgacatgatatgccccggaaacttgctcgcccagtgaattcaaccgattggaaggccctttttgtcttcaagtatcaggttgaccgatctgtcactcggcttcttgatagtattcttggtagccagatcggccggatcgagaagtttcgccgtgttatcaatatgggatacgatacaaaagatactcttctacgatatagcttgatagattctggagaggattatctggccagaaggtgggctactaattctatgcgagttggcatgtgtttccctcaagttgaccagtgccttgtgccaattacaaaaggtactatgcccacgcgctcttgacttgcctacaccgaaacattgcgataccagagtgggcgaaactcaaacgcggagaacccgtgtcactcgaccgagccttggcttgctttgatctctttatacccgaaagtggaactggggatttggatgaagtaggtgttatttcaagtcaaccccctcgacagatctatgcctaactctgatctagatacgagactctctggatgagatcctcggccgctttgtcgcatctcacccggatctttacctctccactcctcgtgagaaggcactggccgtagcatcctggctaacgctgaataatctcacggggatcgatccagagcgggaatatcattctttagagcataactttttaggactggctctaaagcatctagggcataactctctgccgttggtgtcagctgcgatatactgctttgttgcgcagggcgtgggcctgaacgcccatccctgtggatttccgttccatgtgcatgtgatcattacccctcagccgggctcagatatcaatggcaacgctttgagtggggtggggccagggaagcccctttacttggacccgtttcggggtgctagagagactgatgtctcaaatttgcgcagccagttaacatttttgggcatgtccaacacggaccagatcgcaactctgggtgaagcatccacttctggcgttatcttacgctgtggtaagaacatattgaactcgattcgtgtcgaaccccaaaattcgacctcgcgtgccacctccatagatgttgtgagcgcaaagtacgcagcactatggtctgtgatgctactgtcggacgattcgaggccgatggatctacgccatcagttgccatggctcatggaactgttcgctacggactttccttctgatatatttctagtcgagcagtacatcacacctttgtttcgtggcctgttcgagtatgagcatatactgaagagtcttcatgtgatgagggccatggatgaggtcccaaagaagattcggagacgaaccggtggtaatgcaaatatacaatacaaggtgggccagattttccgccatcgtcgctatcattatgaggctattatcacaggctgggactcggaatgtggcgcggacgaacagtggatgacgagaatgggcattgatcgattagaagctggcaggcatcaaagcttctatcatgtgctgtgtgtggttttgtacttgtatcctcttcttggctaatggctaattatggatatctagtgtggcggatcgaagtgcccggtacgtggctgaggaaaatattggcataattcggcctcgcttcacggaattgcctggaagcttgactgccattgcgggtaagcatttcaaacggtgggatgagcgggagaggatgtttgtgagcaacatgaaggatgaataccccgatgactagttcaaatcaaccccgctttatcgggctgctagctcggatagactcgtaaaaagcctagacttatggtaggctatataacgtattcggtaagcgagctgagcaccctaaccaaaacgcgtccatgaattagcacctagtcaattcaactacctaccgtgccactaaagtctaatacgcccccgatcgtctataaagtcaatagagcagtaggatcttattagctattgaggctttttaaaaataatttgttggagtgtggcagaactaggtaggcacaatgatttgtaatgcactctcgagcggtcaaatacgtagtgtttaaacagataaacagctaggcggtcaagtatcaggtcaaagatgagatcaaagtatatattctagaataaaatagtcaatttgtctaactagcctttttttaatacaatttagggctttattataacagttaaatatttgcagatagcttagtagtttaaagattagatgaattataacttcttctctagataaatcataacttttattatgattagtacttataggactcgtactttcctatttaggattatattattattcgttccttcctatttaaaggaacttatttatatagatagttataccttccttctaggggaagtaaggatagggctttatattgaacgaaagagaggctgtttacaatggtacgaacagtatatatactggaccaaaggggaaaatgagtgtatattataggaggagtgttctcctccaaggttatcctgctatatacttatataatcgcggcaagtggctactgactactaaatataataagaaatgtaaagaatgtacggaagtacgccatttctggtcgacactttatccctaaagggatatattgaacgaaggagaggctatttaacaatggtatatatagtatatatactagactaaagggataaaaataagtgtatattataggagaagcgttctcctctaaggttatcctactaggtgcttatataatcgcggtaagtggctattaactactaaatataataagaaatataaagaatatatagaagtatactatttctagtcgatatactctcctagaagctaccttatagctcctaatataattctactgctaagctatttatctatttataagatcccgaatatctactagtcctaaggattaggtaaacctcttataagtttatatagggagtagcttaataagcctatctactagtatattagctatagctacctactaaattaagatatagctagtattaacttcttagtatagctaatagttatagatatcgatatagtaaagctttatttataattatagttatttataagtaagtaaattaattatctatttattattataattaatagtaaggttagtctagtagttaaggttaactatataaagtaacctttcctactatattactaactttctaactttagagatagtaagtagtttagctttagtagttaatattattattatatattacttactagccttctaattaattactatactaaatagtttatataggaaaccttctaagcttttttaattagtataattactaaaggaagtattactagagaagtaaagtactaattaattatataaagggtagtacttaagagctagatattatatattatatagatattagattaagtaattaactactttataatacttagatcttagattaattaggaatttagctagataattagctacctttactatattaaggtaagtaataactataggataaaaggctaagttaagcttttattagtacttatagatctattcctttattataatccttacttaagatataatagctcccttaatctagtagtaatcttagggaaatactaaactccctaagaatcagccttaactagggaataaaataggaattacttctctaactactagaactaaataaatagaatcctagatttaagaaaatctaattaatcttcctaaagtaactatagaaactacctaatttatctaagaataaatctaggtctttaaagctaaagtagtactttaaaagagacttattactactaaagaacttattaaagtaaatagaagaaagcttaagagttactaaaaaggaaaggagttaaactaacctaagaataaaagtaatttaatattagagagtaaatatagttagaagggtaagattaaaagagatattataatatttaaaaagaaatatagtattaaaaatagagaaaactagctaaataaccttaataccctttttgannnnnnnnnnnnnnnnnnnnnnnnnnnnnnnnnnnnnnnnnnnnnnnnnnnnnnnnnnnnnnnnnnnnnnnnnnnnnnnnnnnnnnnnnnnnnnnnnnnnnnnnnnnnnnnnnnnnnnnnnnnnnnnnnnnnnnnnnnnnnnnnnnnnnnnnnnnnnnnnnnnnnnnnnnnnnnnnnnnnnnnnnnnnnnnnnnnnnnnnnnnnnnnnnnnnnnnnnnnnnnnnnnnnnnnnnnnnnnnnnnnnnnnnnnnnnnnnnnnnnnnnnnnnnnnnnnnnnnnnnnnnnnnnnnnnnnnnnnnnnnnnnnnnnnnnnnnnnnnnnnnnnnnnnnnnnnnnnnnnnnnnnnnnnnnnnnnnnnnnnnnnnnnnnnnnnnnnnnnnnnnnnnnnnnnnnnnnnnnnnnnnnnnnnnnnnnnnnnnnnnnnnnnnnnnnnnnnnnnnnnnnnnnnnnnnnnnnnnnnnnnnnnnnnnnnnnnnnnnnnnnnnnnnnnnnnnnnnnnnnnnnnnnnnnnnnnnnnnnnnnnnnnnnnnnnnnnnnnnnnnnnnnnnnnnnnnnnnnnnnnnnnnnnnnnnnnnnnnnnnnnnnnnnnnnnnnnnnnnnnnnnnnnnnnnnnnnnnnnnnnnnnnnnnnnnnnnnnnnnnnnnnnnnnnnnnnnnnnnnnnnnnnnnnnnnnnnnnnnnnnnnnnnnnnnnnnnnnnnnnnnnnnnnnnnnnnnnnnnnnnnnnnnnnnnnnnnnnnnnnnnnnnnnnnnnnnnnnnnnnnnnnnnnnnnnnnnnnnnnnnnnnnnnnnnnnnnnnnnnnnnnnnnnnnnnnnnnnnnnnnnnnnnnnnnnnnnnnnnnnnnnnnnnnnnnnnnnnnnnnnnnnnnnnnnnnnnnnnnnnnnnnnnnnnnnnnnnnnnnnnnnnnnnnnnnnnnnnnnnnnnnnnnnnnnnnnnnnnnnnnnnnnnnnnnnnnnnnnnnnnnnnnnnnnnnnnnnnnnnnnnnnnnnnnnnnnnnnnnnnnnnnnnnnnnnnnnnnnnnnnnnnnnnnnnnnnnnnnnnnnnnnnnnnnnnnnnnnnnnnnnnnnnnnnnnnnnnnnnnnnnnnnnnnnnnnnnnnnnnnnnnnnnnnnnnnnnnnnnnnnnnnnnnnnnnnnnnnnnnnnnnnnnnnnnnnnnnnnnnnnnnnnnnnnnnnnnnnnnnnnnnnnnnnnnnnnnnnnnnnnnnnnnnnnnnnnnnnnnnnnnnnnnnnnnnnnnnnnnnnnnnnnnnnnnnnnnnnnnnnnnnnnnnnnnnnnnnnnnnnnnnnnnnnnnnnnnnnnnnnnnnnnnnnnnnnnnnnnnnnnnnnnnnnnnnnnnnnnnnnnnnnnnnnnnnnnnnnnnnnnnnnnnnnnnnnnnnnnnnnnnnnnnnnnnnnnnnnnnnnnnnnnnnnnnnnnnnnnnnnnnnnnnnnnnnnnnnnnnnnnnnnnnnnnnnnnnnnnnnnnnnnnnnnnnnnnnnnnnnnnnnnnnnnnnnnnnnnnnnnnnnnnnnnnnnnnnnnnnnnnnnnnnnnnnnnnnnnnnnnnnnnnnnnnnnnnnnnnnnnnnnnnnnnnnnnnnnnnnnnnnnnnnnnnnnnnnnnnnnnnnnnnnnnnnnnnnnnnnnnnnnnnnnnnnnnnnnnnnnnnnnnnnnnnnnnnnnnnnnnnnnnnnnnnnnnnnnnnnnnnnnnnnnnnnnnnnnnnnnnnnnnnnnnnnnnnnnnnnnnnnnnnnnnnnnnnnnnnnnnnnnnnnnnnnnnnnnnnnnnnnnnnnnnnnnnnnnnnnnnnnnnnnnnnnnnnnnnnnnnnnnnnnnnnnnnnnnnnnnnnnnnnnnnnnnnnnnnnnnnnnnnnnnnnnnnnnnnnnnnnnnnnnnnnnnnnnnnnnnnnnnnnnnnnnnnnnnnnnnnnnnnnnnnnnnnnnnnnnnnnnnnnnnnnnnnnnnnnnnnnnnnnnnnnnnnnnnnnnnnnnnnnnnnnnnnnnnnnnnnnnnnnnnnnnnnnnnnnnnnnnnnnnnnnnnnnnnnnnnnnnnnnnnnnnnnnnnnnnnnnnnnnnnnnnnnnnnnnnnnnnnnnnnnnnnnnnnnnnnnnnnnnnnnnnnnnnnnnnnnnnnnnnnnnnnnnnnnnnnnnnnnnnnnnnnnnnnnnnnnnnnnnnnnnnnnnnnnnnnnnnnnnnnnnnnnnnnnnnnnnnnnnnnnnnnnnnnnnnnnnnnnnnnnnnnnnnnnnnnnnnnnnnnnnnnnnnnnnnnnnnnnnnnnnnnnnnnnnnnnnnnnnnnnnnnnnnnnnnnnnnnnnnnnnnnnnnnnnnnnnnnnnnnnnnnnnnnnnnnnnnnnnnnnnnnnnnnnnnnnnnnnnnnnnnnnnnnnnnnnnnnnnnnnnnnnnnnnnnnnnnnnnnnnnnnnnnnnnnnnnnnnnnnnnnnnnnnnnnnnnnnnnnnnnnnnnnnnnnnnnnnnnnnnnnnnnnnnnnnnnnnnnnnnnnnnnnnnnnnnnnnnnnnnnnnnnnnnnnnnnnnnnnnnnnnnnnnnnnnnnnnnnnnnnnnnnnnnnnnnnnnnnnnnnnnnnnnnnnnnnnnnnnnnnnnnnnnnnnnnnnnnnnnnnnnnnnnnnnnnnnnnnnnnnnnnnnnnnnnnnnnnnnnnnnnnnnnnnnnnnnnnnnnnnnnnnnnnnnnnnnnnnnnnnnnnnnnnnnnnnnnnnnnnnnnnnnnnnnnnnnnnnnnnnnnnnnnnnnnnnnnnnnnnnnnnnnnnnnnnnnnnnnnnnnnnnnnnnnnnnnnnnnnnnnnnnnnnnnnnnnnnnnnnnnnnnnnnnnnnnnnnnnnnnnnnnnnnnnnnnnnnnnnnnnnnnnnnnnnnnnnnnnnnnnnnnnnnnnnnnnnnnnnnnnnnnnnnnnnnnnnnnnnnnnnnnnnnnnnnnnnnnnnnnnnnnnnnnnnnnnnnnnnnnnnnnnnnnnnnnnnnnnnnnnnnnnnnnnnnnnnnnnnnnnnnnnnnnnnnnnnnnnnnnnnnnnnnnnnnnnnnnnnnnnnnnnnnnnnnnnnnnnnnnnnnnnnnnnnnnnnnnnnnnnnnnnnnnnnnnnnnnnnnnnnnnnnnnnnnnnnnnnnnnnnnnnnnnnnnnnnnnnnnnnnnnnnnnnnnnnnnnnnnnnnnnnnnnnnnnnnnnnnnnnnnnnnnnnnnnnnnnnnnnnnnnnnnnnnnnnnnnnnnnnnnnnnnnnnnnnnnnnnnnnnnnnnnnnnnnnnnnnnnnnnnnnnnnnnnnnnnnnnnnnnnnnnnnnnnnnnnnnnnnnnnnnnnnnnnnnnnnnnnnnnnnnnnnnnnnnnnnnnnnnnnnnnnnnnnnnnnnnnnnnnnnnnnnnnnnnnnnnnnnnnnnnnnnnnnnnnnnnnnnnnnnnnnnnnnnnnnnnnnnnnnnnnnnnnnnnnnnnnnnnnnnnnnnnnnnnnnnnnnnnnnnnnnnnnnnnnnnnnnnnnnnnnnnnnnnnnnnnnnnnnnnnnnnnnnnnnnnnnnnnnnnnnnnnnnnnnnnnnnnnnnnnnnnnnnnnnnnnnnnnnnnnnnnnnnnnnnnnnnnnnnnnnnnnnnnnnnnnnnnnnnnnnnnnnnnnnnnnnnnnnnnnnnnnnnnnnnnnnnnnnnnnnnnnnnnnnnnnnnnnnnnnnnnnnnnnnnnnnnnnnnnnnnnnnnnnnnnnnnnnnnnnnnnnnnnnnnnnnnnnnnnnnnnnnnnnnnnnnnnnnnnnnnnnnnnnnnnnnnnnnnnnnnnnnnnnnnnnnnnnnnnnnnnnnnnnnnnnnnnnnnnnnnnnnnnnnnnnnnnnnnnnnnnnnnnnnnnnnnnnnnnnnnnnnnnnnnnnnnnnnnnnnnnnnnnnnnnnnnnnnnnnnnnnnnnnnnnnnnnnnnnnnnnnnnnnnnnnnnnnnnnnnnnnnnnnnnnnnnnnnnnnnnnnnnnnnnnnnnnnnnnnnnnnnnnnnnnnnnnnnnnnnnnnnnnnnnnnnnnnnnnnnnnnnnnnnnnnnnnnnnnnnnnnnnnnnnnnnnnnnnnnnnnnnnnnnnnnnnnnnnnnnnnnnnnnnnnnnnnnnnnnnnnnnnnnnnnnnnnnnnnnnnnnnnnnnnnnnnnnnnnnnnnnnnnnnnnnnnnnnnnnnnnnnnnnnnnnnnnnnnnnnnnnnnnnnnnnnnnnnnnnnnnnnnnnnnnnnnnnnnnnnnnnnnnnnnnnnnnnnnnnnnnnnnnnnnnnnnnnnnnnnnnnnnnnnnnnnnnnnnnnnnnnnnnnnnnnnnnnnnnnnnnnnnnnnnnnnnnnnnnnnnnnnnnnnnnnnnnnnnnnnnnnnnnnnnnnnnnnnnnnnnnnnnnnnnnnnnnnnnnnnnnnnnnnnnnnnnnnnnnnnnnnnnnnnnnnnnnnnnnnnnnnnnnnnnnnnnnnnnnnnnnnnnnnnnnnnnnnnnnnnnnnnnnnnnnnnnnnnnnnnnnnnnnnnnnnnnnnnnnnnnnnnnnnnnnnnnnnnnnnnnnnnnnnnnnnnnnnnnnnnnnnnnnnnnnnnnnnnnnnnnnnnnnnnnnnnnnnnnnnnnnnnnnnnnnnnnnnnnnnnnnnnnnnnnnnnnnnnnnnnnnnnnnnnnnnnnnnnnnnnnnnnnnnnnnnnnnnnnnnnnnnnnnnnnnnnnnnnnnnnnnnnnnnnnnnnnnnnnnnnnnnnnnnnnnnnnnnnnnnnnnnnnnnnnnnnnnnnnnnnnnnnnnnnnnnnnnnnnnnnnnnnnnttaatagattagactatttagaattttagaatatattagaaagtaggtatactacctcctattcctagataaatatactataatttataatattttccctatctctttcctctaactataagaataaagagaagggaaactaaaataactactattattagaattagtagataataataaataggaggttaaagagtttaaagataactatatttttaaagataaattatattatctagttaaatagtaggactagccttctaaatataactaataggtcctagagaatataataattaatatactgaaacttattataaaatataaaaaggtataaaagatataaaagaaattaacctaagtaatatctatactaggttactattaaattattataactataatatctaattactataaggaaagatagttatatacttcttaagtattacctctatatctagattattaagtaattctactatcttagagtaaatttattagaataaaattatagtatctatctaagtaataagtaattcctctaaatttataagttaggattactctaaggcctatactataaagatatcttagggataaatagtagtataagtatcttagttacctataggatacttaataataaaggctatatagttattataaatagattaaaaagaaatattaataaaactattataaggaagattagatttatcttaatacttatagtaggaatatatatcctacttaaattatagtttttataatatattcttataagggtattaaaagctataattagattataaactatatctataactactttaataaacttagaagggaaaaggaactatacttctttattatccttatctaatatacctatagctactctaagggtccttctaattattaactaaaattactctatctaagaaagaactactagtaactagaaacaatttcccttannnnnnnnnnnnnnnnnnnnnnnnnnnnnnnnnnnnnnnnnnnnnnnnnnnnnnnnnnnnnnnnnnnnnnnnnnnnnnnnnnnnnnnnnnnnnnnnnnnnnnnnnnnnnnnnnnnnnnnnnnnnnnnnnnnnnnnnnnnnnnnnnnnnnnnnnnnnnnnnnnnnnnnnnnnnnnnnnnnnnnnnnnnnnnnnnnnnnnnnnnnnnnnnnnnnnnnnnnnnnnnnnnnnnnnnnnnnnnnnnnnnnnnnnnnnnnnnnnnnnnnnnnnnnnnnnnnnnnnnnnnnnnnnnnnnnnnnnnnnnnnnnnnnnnnnnnnnnnnnnnnnnnnnnnnnnnnnnnnnnnnnnnnnnnnnnnnnnnnnnnnnnnnnnnnnnnnnnnnnnnnnnnnnnnnnnnnnnnnnnnnnnnnnnnnnnnnnnnnnnnnnnnnnnnnnnnnnnnnnnnnnnnnnnnnnnnnnnnnnnnnnnnnnnnnnnnnnnnnnnnnnnnnnnnnnnnnnnnnnnnnnnnnnnnnnnnnnnnnnnnnnnnnnnnnnnnnnnnnnnnnnnnnnnnnnnnnnnnnnnnnnnnnnnnnnnnnnnnnnnnnnnnnnnnnnnnnnnnnnnnnnnnnnnnnnnnnnnnnnnnnnnnnnnnnnnnnnnnnnnnnnnnnnnnnnnnnnnnnnnnnnnnnnnnnnnnnnnnnnnnnnnnnnnnnnnnnnnnnnnnnnnnnnnnnnnnnnnnnnnnnnnnnnnnnnnnnnnnnnnnnnnnnnnnnnnnnnnnnnnnnnnnnnnnnnnnnnnnnnnnnnnnnnnnnnnnnnnnnnnnnnnnnnnnnnnnnnnnnnnnnnnnnnnnnnnnnnnnnnnnnnnnnnnnnnnnnnnnnnnnnnnnnnnnnnnnnnnnnnnnnnnnnnnnnnnnnnnnnnnnnnnnnnnnnnnnnnnnnnnnnnnnnnnnnnnnnnnnnnnnnnnnnnnnnnnnnnnnnnnnnnnnnnnnnnnnnnnnnnnnnnnnnnnnnnnnnnnnnnnnnnnnnnnnnnnnnnnnnnnnnnnnnnnnnnnnnnnnnnnnnnnnnnnnnnnnnnnnnnnnnnnnnnnnnnnnnnnnnnnnnnnnnnnnnnnnnnnnnnnnnnnnnnnnnnnnnnnnnnnnnnnnnnnnnnnnnnnnnnnnnnnnnnnnnnnnnnnnnnnnnnnnnnnnnnnnnnnnnnnnnnnnnnnnnnnnnnnnnnnnnnnnnnnnnnnnnnnnnnnnnnnnnnnnnnnnnnnnnnnnnnnnnnnnnnnnnnnnnnnnnnnnnnnnnnnnnnnnnnnnnnnnnnnnnnnnnnnnnnnnnnnnnnnnnnnnnnnnnnnnnnnnnnnnnnnnnnnnnnnnnnnnnnnnnnnnnnnnnnnnnnnnnnnnnnnnnnnnnnnnnnnnnnnnnnnnnnnnnnnnnnnnnnnnnnnnnnnnnnnnnnnnnnnnnnnnnnnnnnnnnnnnnnnnnnnnnnnnnnnnnnnnnnnnnnnnnnnnnnnnnnnnnnnnnnnnnnnnnnnnnnnnnnnnnnnnnnnnnnnnnnnnnnnnnnnnnnnnnnnnnnnnnnnnnnnnnnnnnnnnnnnnnnnnnnnnnnnnnnnnnnnnnnnnnnnnnnnnnnnnnnnnnnnnnnnnnnnnnnnnnnnnnnnnnnnnnnnnnnnnnnnnnnnnnnnnnnnnnnnnnnnnnnnnnnnnnnnnnnnnnnnnnnnnnnnnnnnnnnnnnnnnnnnnnnnnnnnnnnnnnnnnnnnnnnnnnnnnnnnnnnnnnnnnnnnnnnnnnnnnnnnnnnnnnnnnnnnnnnnnnnnnnnnnnnnnnnnnnnnnnnnnnnnnnnnnnnnnnnnnnnnnnnnnnnnnnnnnnnnnnnnnnnnnnnnnnnnnnnnnnnnnnnnnnnnnnnnnnnnnnnnnnnnnnnnnnnnnnnnnnnnnnnnnnnnnnnnnnnnnnnnnnnnnnnnnnnnnnnnnnnnnnnnnnnnnnnnnnnnnnnnnnnnnnnnnnnnnnnnnnnnnnnnnnnnnnnnnnnnnnnnnnnnnnnnnnnnnnnnnnnnnnnnnnnnnnnnnnnnnnnnnnnnnnnnnnnnnnnnnnnnnnnnnnnnnnnnnnnnnnnnnnnnnnnnnnnnnnnnnnnnnnnnnnnnnnnnnnnnnnnnnnnnnnnnnnnnnnnnnnnnnnnnnnnnnnnnnnnnnnnnnnnnnnnnnnnnnnnnnnnnnnnnnnnnnnnnnnnnnnnnnnnnnnnnnnnnnnnnnnnnnnnnnnnnnnnnnnnnnnnnnnnnnnnnnnnnnnnnnnnnnnnnnnnnnnnnnnnnnnnnnnnnnnnnnnnnnnnnnnnnnnnnnnnnnnnnnnnnnnnnnnnnnnnnnnnnnnnnnnnnnnnnnnnnnnnnnnnnnnnnnnnnnnnnnnnnnnnnnnnnnnnnnnnnnnnnnnnnnnnnnnnnnnnnnnnnnnnnnnnnnnnnnnnnnnnnnnnnnnnnnnnnnnnnnnnnnnnnnnnnnnnnnnnnnnnnnnnnnnnnnnnnnnnnnnnnnnnnnnnnnnnnnnnnnnnnnnnnnnnnnnnnnnnnnnnnnnnnnnnnnnnnnnnnnnnnnnnnnnnnnnnnnnnnnnnnnnnnnnnnnnnnnnnnnnnnnnnnnnnnnnnnnnnnnnnnnnnnnnnnnnnnnnnnnnnnnnnnnnnnnnnnnnnnnnnnnnnnnnnnnnnnnnnnnnnnnnnnnnnnnnnnnnnnnnnnnnnnnnnnnnnnnnnnnnnnnnnnnnnnnnnnnnnnnnnnnnnnnnnnnnnnnnnnnnnnnnnnnnnnnnnnnnnnnnnnnnnnnnnnnnnnnnnnnnnnnnnnnnnnnnnnnnnnnnnnnnnnnnnnnnnnnnnnnnnnnnnnnnnnnnnnnnnnnnnnnnnnnnnnnnnnnnnnnnnnnnnnnnnnnnnnnnnnnnnnnnnnnnnnnnnnnnnnnnnnnnnnnnnnnnnnnnnnnnnnnnnnnnnnnnnnnnnnnnnnnnnnnnnnnnnnnnnnnnnnnnnnnnnnnnnnnnnnnnnnnnnnnnnnnnnnnnnnnnnnnnnnnnnnnnnnnnnnnnnnnnnnnnnnnnnnnnnnnnnnnnnnnnnnnnnnnnnnnnnnnnnnnnnnnnnnnnnnnnnnnnnnnnnnnnnnnnnnnnnnnnnnnnnnnnnnnnnnnnnnnnnnnnnnnnnnnnnnnnnnnnnnnnnnnnnnnnnnnnnnnnnnnnnnnnnnnnnnnnnnnnnnnnnnnnnnnnnnnnnnnnnnnnnnnnnnnnnnnnnnnnnnnnnnnnnnnnnnnnnnnnnnnnnnnnnnnnnnnnnnnnnnnnnnnnnnnnnnnnnnnnnnnnnnnnnnnnnnnnnnnnnnnnnnnnnnnnnnnnnnnnnnnnnnnnnnnnnnnnnnnnnnnnnnnnnnnnnnnnnnnnnnnnnnnnnnnnnnnnnnnnnnnnnnnnnnnnnnnnnnnnnnnnnnnnnnnnnnnnnnnnnnnnnnnnnnnnnnnnnnnnnnnnnnnnnnnnnnnnnnnnnnnnnnnnnnnnnnnnnnnnnnnnnnnnnnnnnnnnnnnnnnnnnnnnnnnnnnnnnnnnnnnnnnnnnnnnnnnnnnnnnnnnnnnnnnnnnnnnnnnnnnnnnnnnnnnnnnnnnnnnnnnnnnnnnnnnnnnnnnnnnnnnnnnnnnnnnnnnnnnnnnnnnnnnnnnnnnnnnnnnnnnnnnnnnnnnnnnnnnnnnnnnnnnnnnnnnnnnnnnnnnnnnnnnnnnnnnnnnnnnnnnnnnnnnnnnnnnnnnnnnnnnnnnnnnnnnnnnnnnnnnnnnnnnnnnnnnnnnnnnnnnnnnnnnnnnnnnnnnnnnnnnnnnnnnnnnnnnnnnnnnnnnnnnnnnnnnnnnnnnnnnnnnnnnnnnnnnnnnnnnnnnnnnnnnnnnnnnnnnnnnnnnnnnnnnnnnnnnnnnnnnnnnnnnnnnnnnnnnnnnnnnnnnnnnnnnnnnnnnnnnnnnnnnnnnnnnnnnnnnnnnnnnnnnnnnnnnnnnnnnnnnnnnnnnnnnnnnnnnnnnnnnnnnnnnnnnnnnnnnnnnnnnnnnnnnnnnnnnnnnnnnnnnnnnnnnnnnnnnnnnnnnnnnnnnnnnnnnnnnnnnnnnnnnnnnnnnnnnnnnnnnnnnnnnnnnnnnnnnnnnnnnnnnnnnnnnnnnnnnnnnnnnnnnnnnnnnnnnnnnnnnnnnnnnnnnnnnnnnnnnnnnnnnnnnnnnnnnnnnnnnnnnnnnnnnnnnnnnnnnnnnnnnnnnnnnnnnnnnnnnnnnnnnnnnnnnnnnnnnnnnnnnnnnnnnnnnnnnnnnnnnnnnnnnnnnnnnnnnnnnnnnnnnnnnnnnnnnnnnnnnnnnnnnnnnnnnnnnnnnnnnnnnnnnnnnnnnnnnnnnnnnnnnnnnnnnnnnnnnnnnnnnnnnnnnnnnnnnnnnnnnnnnnnnnnnnnnnnnnnnnnnnnnnnnnnnnnnnnnnnnnnnnnnnnnnnnnnnnnnnnnnnnnnnnnnnnnnnnnnnnnnnnnnnnnnnnnnnnnnnnnnnnnnnnnnnnnnnnnnnnnnnnnnnnnnnnnnnnnnnnnnnnnnnnnnnnnnnnnnnnnnnnnnnnnnnnnnnnnnnnnnnnnnnnnnnnnnnnnnnnnnnnnnnnnnnnnnnnnnnnnnnnnnnnnnnnnnnnnnnnnnnnnnnnnnnnnnnnnnnnnnnnnnnnnnnnnnnnnnnnnnnnnnnnnnnnnnnnnnnnnnnnnnnnnnnnnnnnnnnnnnnnnnnnnnnnnnnnnnnnnnnnnnnnnnnnnnnnnnnnnnnnnnnnnnnnnnnnnnnnnnnnnnnnnnnnnnnnnnnnnnnnnnnnnnnnnnnnnnnnnnnnnnnnnnnnnnnnnnnnnnnnnnnnnnnnnnnnnnnnnnnnnnnnnnnnnnnnnnnnnnnnnnnnnnnnnnnnnnnnnnnnnnnnnnnnnnnnnnnnnnnnnnnnnnnnnnnnnnnnnnnnnnnnnnnnnnnnnnnnnnnnnnnnnnnnnnnnnnnnnnnnnnnnnnnnnnnnnnnnnnnnnnnnnnnnnnnnnnnnnnnnnnnnnnnnnnnnnnnnnnnnnnnnnnnnnnnnnnnnnnnnnnnnnnnnnnnnnnnnnnnnnnnnnnnnnnnnnnnnnnnnnnnnnnnnnnnnnnnnnnnnnnnnnnnnnnnnnnnnnnnnnnnnnnnnnnnnnnnnnnnnnnnnnnnnnnnnnnnnnnnnnnnnnnnnnnnnnnnnnnnnnnnnnnnnnnnnnnnnnnnnnnnnnnnnnnnnnnnnnnnnnnnnnnnnnnnnnnnnnnnnnnnnnnnnnnnnnnnnnnnnnnnnnnnnnnnnnnnnnnnnnnnnnnnnnnnnnnnnnnnnnnnnnnnnnnnnnnnnnnnnnnnnnnnnnnnnnnnnnnnnnnnnnnnnnnnnnnnnnnnnnnnnnnnnnnnnnnnnnnnnnnnnnnnnnnnnnnnnnnnnnnnnnnnnnnnnnnnnnnnnnnnnnnnnnnnnnnnnnnnnnnnnnnnnnnnnnnnnnnnnnnnnnnnnnnnnnnnnnnnnnnnnnnnnnnnnnnnnnnnnnnnnnnnnnnnnnnnnnnnnnnnnnnnnnnnnnnnnnnnnnnnnnnnnnnnnnnnnnnnnnnnnnnnnnnnnnnnnnnnnnnnnnnnnnnnnnnnnnnnnnnnnnnnnnnnnnnnnnnnnnnnnnnnnnnnnnnnnnnnnnnnnnnnnnnnnnnnnnnnnnnnnnnnnnnnnnnnnnnnnnnnnnnnnnnnnnnnnnnnnnnnnnnnnnnnnnnnnnnnnnnnnnnnnnnnnnnnnnnnnnnnnnnnnnnnnnnnnnnnnnnnnnnnnnnnnnnnnnnnnnnnnnnnnnnnnnnnnnnnnnnnnnnnnnnnnnnnnnnnnnnnnnnnnnnnnnnnnnnnnnnnnnnnnnnnnnnnnnnnnnnnnnnnnnnnnnnnnnnnnnnnnnnnnnnnnnnnnnnnnnnnnnnnnnnnnnnnnnnnnnnnnnnnnnnnnnnnnnnnnnnnnnnnnnnnnnnnnnnnnnnnnnnnnnnnnnnnnnnnnnnnnnnnnnnnnnnnnnnnnnnnnnnnnnnnnnnnnnnnnnnnnnnnnnnnnnnnnnnnnnnnnnnnnnnnnnnnnnnnnnnnnnnnnnnnnnnnnnnnnnnnnnnnnnnnnnnnnnnnnnnnnnnnnnnnnnnnnnnnnnnnnnnnnnnnnnnnnnnnnnnnnnnnnnnnnnnnnnnnnnnnnnnnnnnnnnnnnnnnnnnnnnnnnnnnnnnnnnnnnnnnnnnnnnnnnnnnnnnnnnnnnnnnnnnnnnnnnnnnnnnnnnnnnnnnnnnnnnnnnnnnnnnnnnnnnnnnnnnnnnnnnnnnnnnnnnnnnnnnnnnnnnnnnnnnnnnnnnnnnnnnnnnnnnnnnnnnnnnnnnnnnnnnnnnnnnnnnnnnnnnnnnnnnnnnnnnnnnnnnnnnnnnnnnnnnnnnnnnnnnnnnnnnnnnnnnnnnnnnnnnnnnnnnnnnnnnnnnnnnnnnnnnnnnnnnnnnnnnnnnnnnnnnnnnnnnnnnnnnnnnnnnnnnnnnnnnnnnnnnnnnnnnnnnnnnnnnnnnnnnnnnnnnnnnnnnnnnnnnnnnnnnnnnnnnnnnnnnnnnnnnnnnnnnnnnnnnnnnnnnnnnnnnnnnnnnnnnnnnnnnnnnnnnnnnnnnnnnnnnnnnnnnnnnnnnnnnnnnnnnnnnnnnnnnnnnnnnnnnnnnnnnnnnnnnnnnnnnnnnnnnnnnnnnnnnnnnnnnnnnnnnnnnnnnnnnnnnnnnnnnnnnnnnnnnnnnnnnnnnnnnnnnnnnnnnnnnnnnnnnnnnnnnnnnnnnnnnnnnnnnnnnnnnnnnnnnnnnnnnnnnnnnnnnnnnnnnnnnnnnnnnnnnnnnnnnnnnnnnnnnnnnnnnnnnnnnnnnnnnnnnnnnnnnnnnnnnnnnnnnnnnnnnnnnnnnnnnnnnnnnnnnnnnnnnnnnnnnnnnnnnnnnnnnnnnnnnnnnnnnnnnnnnnnnnnnnnnnnnnnnnnnnnnnnnnnnnnnnnnnnnnnnnnnnnnnnnnnnnnnnnnnnnnnnnnnnnnnnnnnnnnnnnnnnnnnnnnnnnnnnnnnnnnnnnnnnnnnnnnnnnnnnnnnnnnnnnnnnnnnnnnnnnnnnnnnnnnnnnnnnnnnnnnnnnnnnnnnnnnnnnnnnnnnnnnnnnnnnnnnnnnnnnnnnnnnnnnnnnnnnnnnnnnnnnnnnnnnnnnnnnnnnnnnnnnnnnnnnnnnnnnnnnnnnnnnnnnnnnnnnnnnnnnnnnnnnnnnnnnnnnnnnnnnnnnnnnnnnnnnnnnnnnnnnnnnnnnnnnnnnnnnnnnnnnnnnnnnnnnnnnnnnnnnnnnnnnnnnnnnnnnnnnnnnnnnnnnnnnnnnnnnnnnnnnnnnnnnnnnnnnnnnnnnnnnnnnnnnnnnnnnnnnnnnnnnnnnnnnnnnnnnnnnnnnnnnnnnnnnnnnnnnnnnnnnnnnnnnnnnnnnnnnnnnnnnnnnnnnnnnnnnnnnnnnnnnnnnnnnnnnnnnnnnnnnnnnnnnnnnnnnnnnnnnnnnnnnnnnnnnnnnnnnnnnnnnnnnnnnnnnnnnnnnnnnnnnnnnnnnnnnnnnnnnnnnnnnnnnnnnnnnnnnnnnnnnnnnnnnnnnnnnnnnnnnnnnnnnnnnnnnnnnnnnnnnnnnnnnnnnnnnnnnnnnnnnnnnnnnnnnnnnnnnnnnnnnnnnnnnnnnnnnnnnnnnnnnnnnnnnnnnnnnnnnnnnnnnnnnnnnnnnnnnnnnnnnnnnnnnnnnnnnnnnnnnnnnnnnnnnnnnnnnnnnnnnnnnnnnnnnnnnnnnnnnnnnnnnnnnnnnnnnnnnnnnnnnnnnnnnnnnnnnnnnnnnnnnnnnnnnnnnnnnnnnnnnnnnnnnnnnnnnnnnnnnnnnnnnnnnnnnnnnnnnnnnnnnnnnnnnnnnnnnnnnnnnnnnnnnnnnnnnnnnnnnnnnnnnnnnnnnnnnnnnnnnnnnnnnnnnnnnnnnnnnnnnnnnnnnnnnnnnnnnnnnnnnnnnnnnnnnnnnnnnnnnnnnnnnnnnnnnnnnnnnnnnnnnnnnnnnnnnnnnnnnnnnnnnnnnnnnnnnnnnnnnnnnnnnnnnnnnnnnnnnnnnnnnnnnnnnnnnnnnnnnnnnnnnnnnnnnnnnnnnnnnnnnnnnnnnnnnnnnnnnnnnnnnnnnnnnnnnnnnnnnnnnnnnnnnnnnnnnnnnnnnnnnnnnnnnnnnnnnnnnnnnnnnnnnnnnnnnnnnnnnnnnnnnnnnnnnnnnnnnnnnnnnnnnnnnnnnnnnnnnnnnnnnnnnnnnnnnnnnnnnnnnnnnnnnnnnnnnnnnnnnnnnnnnnnnnnnnnnnnnnnnnnnnnnnnnnnnnnnnnnnnnnnnnnnnnnnnnnnnnnnnnnnnnnnnnnnnnnnnnnnnnnnnnnnnnnnnnnnnnnnnnnnnnnnnnnnnnnnnnnnnnnnnnnnnnnnnnnnnnnnnnnnnnnnnnnnnnnnnnnnnnnnnnnnnnnnnnnnnnnnnnnnnnnnnnnnnnnnnnnnnnnnnnnnnnnnnnnnnnnnnnnnnnnnnnnnnnnnnnnnnnnnnnnnnnnnnnnnnnnnnnnnnnnnnnnnnnnnnnnnnnnnnnnnnnnnnnnnnnnnnnnnnnnnnnnnnnnnnnnnnnnnnnnnnnnnnnnnnnnnnnnnnnnnnnnnnnnnnnnnnnnnnnnnnnnnnnnnnnnnnnnnnnnnnnnnnnnnnnnnnnnnnnnnnnnnnnnnnnnnnnnnnnnnnnnnnnnnnnnnnnnnnnnnnnnnnnnnnnnnnnnnnnnnnnnnnnnnnnnnnnnnnnnnnnnnnnnnnnnnnnnnnnnnnnnnnnnnnnnnnnnnnnnnnnnnnnnnnnnnnnnnnnnnnnnnnnnnnnnnnnnnnnnnnnnnnnnnnnnnnnnnnnnnnnnnnnnnnnnnnnnnnnnnnnnnnnnnnnnnnnnnnnnnnnnnnnnnnnnnnnnnnnnnnnnnnnnnnnnnnnnnnnnnnnnnnnnnnnnnnnnnnnnnnnnnnnnnnnnnnnnnnnnnnnnnnnnnnnnnnnnnnnnnnnnnnnnnnnnnnnnnnnnnnnnnnnnnnnnnnnnnnnnnnnnnnnnnnnnnnnnnnnnnnnnnnnnnnnnnnnnnnnnnnnnnnnnnnnnnnnnnnnnnnnnnnnnnnnnnnnnnnnnnnnnnnnnnnnnnnnnnnnnnnnnnnnnnnnnnnnnnnnnnnnnnnnnnnnnnnnnnnnnnnnnnnnnnnnnnnnnnnnnnnnnnnnnnnnnnnnnnnnnnnnnnnnnnnnnnnnnnnnnnnnnnnnnnnnnnnnnnnnnnnnnnnnnnnnnnnnnnnnnnnnnnnnnnnnnnnnnnnnnnnnnnnnnnnnnnnnnnnnnnnnnnnnnnnnnnnnnnnnnnnnnnnnnnnnnnnnnnnnnnnnnnnnnnnnnnnnnnnnnnnnnnnnnnnnnnnnnnnnnnnnnnnnnnnnnnnnnnnnnnnnnnnnnnnnnnnnnnnnnnnnnnnnnnnnnnnnnnnnnnnnnnnnnnnnnnnnnnnnnnnnnnnnnnnnnnnnnnnnnnnnnnnnnnnnnnnnnnnnnnnnnnnnnnnnnnnnnnnnnnnnnnnnnnnnnnnnnnnnnnnnnnnnnnnnnnnnnnnnnnnnnnnnnnnnnnnnnnnnnnnnnnnnnnnnnnnnnnnnnnnnnnnnnnnnnnnnnnnnnnnnnnnnnnnnnnnnnnnnnnnnnnnnnnnnnnnnnnnnnnnnnnnnnnnnnnnnnnnnnnnnnnnnnnnnnnnnnnnnnnnnnnnnnnnnnnnnnnnnnnnnnnnnnnnnnnnnnnnnnnnnnnnnnnnnnnnnnnnnnnnnnnnnnnnnnnnnnnnnnnnnnnnnnnnnnnnnnnnnnnnnnnnnnnnnnnnnnnnnnnnnnnnnnnnnnnnnnnnnnnnnnnnnnnnnnnnnnnnnnnnnnnnnnnnnnnnnnnnnnnnnnnnnnnnnnnnnnnnnnnnnnnnnnnnnnnnnnnnnnnnnnnnnnnnnnnnnnnnnnnnnnnnnnnnnnnnnnnnnnnnnnnnnnnnnnnnnnnnnnnnnnnnnnnnnnnnnnnnnnnnnnnnnnnnnnnnnnnnnnnnnnnnnnnnnnnnnnnnnnnnnnnnnnnnnnnnnnnnnnnnnnnnnnnnnnnnnnnnnnnnnnnnnnnnnnnnnnnnnnnnnnnnnnnnnnnnnnnnnnnnnnnnnnnnnnnnnnnnnnnnnnnnnnnnnnnnnnnnnnnnnnnnnnnnnnnnnnnnnnnnnnnnnnnnnnnnnnnnnnnnnnnnnnnnnnnnnnnnnnnnnnnnnnnnnnnnnnnnnnnnnnnnnnnnnnnnnnnnnnnnnnnnnnnnnnnnnnnnnnnnnnnnnnnnnnnnnnnnnnnnnnnnnnnnnnnnnnnnnnnnnnnnnnnnnnnnnnnnnnnnnnnnnnnnnnnnnnnnnnnnnnnnnnnnnnnnnnnnnnnnnnnnnnnnnnnnnnnnnnnnnnnnnnnnnnnnnnnnnnnnnnnnnnnnnnnnnnnnnnnnnnnnnnnnnnnnnnnnnnnnnnnnnnnnnnnnnnnnnnnnnnnnnnnnnnnnnnnnnnnnnnnnnnnnnnnnnnnnnnnnnnnnnnnnnnnnnnnnnnnnnnnnnnnnnnnnnnnnnnnnnnnnnnnnnnnnnnnnnnnnnnnnnnnnnnnnnnnnnnnnnnnnnnnnnnnnnnnnnnnnnnnnnnnnnnnnnnnnnnnnnnnnnnnnnnnnnnnnnnnnnnnnnnnnnnnnnnnnnnnnnnnnnnnnnnnnnnnnnnnnnnnnnnnnnnnnnnnnnnnnnnnnnnnnnnnnnnnnnnnnnnnnnnnnnnnnnnnnnnnnnnnnnnnnnnnnnnnnnnnnnnnnnnnnnnnnnnnnnnnnnnnnnnnnnnnnnnnnnnnnnnnnnnnnnnnnnnnnnnnnnnnnnnnnnnnnnnnnnnnnnnnnnnnnnnnnnnnnnnnnnnnnnnnnnnnnnnnnnnnnnnnnnnnnnnnnnnnnnnnnnnnnnnnnnnnnnnnnnnnnnnnnnnnnnnnnnnnnnnnnnnnnnnnnnnnnnnnnnnnnnnnnnnnnnnnnnnnnnnnnnnnnnnnnnnnnnnnnnnnnnnnnnnnnnnnnnnnnnnnnnnnnnnnnnnnnnnnnnnnnnnnnnnnnnnnnnnnnnnnnnnnnnnnnnnnnnnnnnnnnnnnnnnnnnnnnnnnnnnnnnnnnnnnnnnnnnnnnnnnnnnnnnnnnnnnnnnnnnnnnnnnnnnnnnnnnnnnnnnnnnnnnnnnnnnnnnnnnnnnnnnnnnnnnnnnnnnnnnnnnnnnnnnnnnnnnnnnnnnnnnnnnnnnnnnnnnnnnnnnnnnnnnnnnnnnnnnnnnnnnnnnnnnnnnnnnnnnnnnnnnnnnnnnnnnnnnnnnnnnnnnnnnnnnnnnnnnnnnnnnnnnnnnnnnnnnnnnnnnnnnnnnnnnnnnnnnnnnnnnnnnnnnnnnnnnnnnnnnnnnnnnnnnnnnnnnnnnnnnnnnnnnnnnnnnnnnnnnnnnnnnnnnnnnnnnnnnnnnnnnnnnnnnnnnnnnnnnnnnnnnnnnnnnnnnnnnnnnnnnnnnnnnnnnnnnnnnnnnnnnnnnnnnnnnnnnnnnnnnnnnnnnnnnnnnnnnnnnnnnnnnnnnnnnnnnnnnnnnnnnnnnnnnnnnnnnnnnnnnnnnnnnnnnnnnnnnnnnnnnnnnnnnnnnnnnnnnnnnnnnnnnnnnnnnnnnnnnnnnnnnnnnnnnnnnnnnnnnnnnnnnnnnnnnnnnnnnnnnnnnnnnnnnnnnnnnnnnnnnnnnnnnnnnnnnnnnnnnnnnnnnnnnnnnnnnnnnnnnnnnnnnnnnnnnnnnnnnnnnnnnnnnnnnnnnnnnnnnnnnnnnnnnnnnnnnnnnnnnnnnnnnnnnnnnnnnnnnnnnnnnnnnnnnnnnnnnnnnnnnnnnnnnnnnnnnnnnnnnnnnnnnnnnnnnnnnnnnnnnnnnnnnnnnnnnnnnnnnnnnnnnnnnnnnnnnnnnnnnnnnnnnnnnnnnnnnnnnnnnnnnnnnnnnnnnnnnnnnnnnnnnnnnnnnnnnnnnnnnnnnnnnnnnnnnnnnnnnnnnnnnnnnnnnnnnnnnnnnnnnnnnnnnnnnnnnnnnnnnnnnnnnnnnnnnnnnnnnnnnnnnnnnnnnnnnnnnnnnnnnnnnnnnnnnnnnnnnnnnnnnnnnnnnnnnnnnnnnnnnnnnnnnnnnnnnnnnnnnnnnnnnnnnnnnnnnnnnnnnnnnnnnnnnnnnnnnnnnnnnnnnnnnnnnnnnnnnnnnnnnnnnnnnnnnnnnnnnnnnnnnnnnnnnnnnnnnnnnnnnnnnnnnnnnnnnnnnnnnnnnnnnnnnnnnnnnnnnnnnnnnnnnnnnnnnnnnnnnnnnnnnnnnnnnnnnnnnnnnnnnnnnnnnnnnnnnnnnnnnnnnnnnnnnnnnnnnnnnnnnnnnnnnnnnnnnnnnnnnnnnnnnnnnnnnnnnnnnnnnnnnnnnnnnnnnnnnnnnnnnnnnnnnnnnnnnnnnnnnnnnnnnnnnnnnnnnnnnnnnnnnnnnnnnnnnnnnnnnnnnnnnnnnnnnnnnnnnnnnnnnnnnnnnnnnnnnnnnnnnnnnnnnnnnnnnnnnnnnnnnnnnnnnnnnnnnnnnnnnnnnnnnnnnnnnnnnnnnnnnnnnnnnnnnnnnnnnnnnnnnnnnnnnnnnnnnnnnnnnnnnnnnnnnnnnnnnnnnnnnnnnnnnnnnnnnnnnnnnnnnnnnnnnnnnnnnnnnnnnnnnnnnnnnnnnnnnnnnnnnnnnnnnnnnnnnnnnnnnnnnnnnnnnnnnnnnnnnnnnnnnnnnnnnnnnnnnnnnnnnnnnnnnnnnnnnnnnnnnnnnnnnnnnnnnnnnnnnnnnnnnnnnnnnnnnnnnnnnnnnnnnnnnnnnnnnnnnnnnnnnnnnnnnnnnnnnnnnnnnnnnnnnnnnnnnnnnnnnnnnnnnnnnnnnnnnnnnnnnnnnnnnnnnnnnnnnnnnnnnnnnnnnnnnnnnnnnnnnnnnnnnnnnnnnnnnnnnnnnnnnnnnnnnnnnnnnnnnnnnnnnnnnnnnnnnnnnnnnnnnnnnnnnnnnnnnnnnnnnnnnnnnnnnnnnnnnnnnnnnnnnnnnnnnnnnnnnnnnnnnnnnnnnnnnnnnnnnnnnnnnnnnnnnnnnnnnnnnnnnnnnnnnnnnnnnnnnnnnnnnnnnnnnnnnnnnnnnnnnnnnnnnnnnnnnnnnnnnnnnnnnnnnnnnnnnnnnnnnnnnnnnnnnnnnnnnnnnnnnnnnnnnnnnnnnnnnnnnnnnnnnnnnnnnnnnnnnnnnnnnnnnnnnnnnnnnnnnnnnnnnnnnnnnnnnnnnnnnnnnnnnnnnnnnnnnnnnnnnnnnnnnnnnnnnnnnnnnnnnnnnnnnnnnnnnnnnnnnnnnnnnnnnnnnnnnnnnnnnnnnnnnnnnnnnnnnnnnnnnnnnnnnnnnnnnnnnnnnnnnnnnnnnnnnnnnnnnnnnnnnnnnnnnnnnnnnnnnnnnnnnnnnnnnnnnnnnnnnnnnnnnnnnnnnnnnnnnnnnnnnnnnnnnnnnnnnnnnnnnnnnnnnnnnnnnnnnnnnnnnnnnnnnnnnnnnnnnnnnnnnnnnnnnnnnnnnnnnnnnnnnnnnnnnnnnnnnnnnnnnnnnnnnnnnnnnnnnnnnnnnnnnnnnnnnnnnnnnnnnnnnnnnnnnnnnnnnnnnnnnnnnnnnnnnnnnnnnnnnnnnnnnnnnnnnnnnnnnnnnnnnnnnnnnnnnnnnnnnnnnnnnnnnnnnnnnnnnnnnnnnnnnnnnnnnnnnnnnnnnnnnnnnnnnnnnnnnnnnnnnnnnnnnnnnnnnnnnnnnnnnnnnnnnnnnnnnnnnnnnnnnnnnnnnnnnnnnnnnnnnnnnnnnnnnnnnnnnnnnnnnnnnnnnnnnnnnnnnnnnnnnnnnnnnnnnnnnnnnnnnnnnnnnnnnnnnnnnnnnnnnnnnnnnnnnnnnnnnnnnnnnnnnnnnnnnnnnnnnnnnnnnnnnnnnnnnnnnnnnnnnnnnnnnnnnnnnnnnnnnnnnnnnnnnnnnnnnnnnnnnnnnnnnnnnnnnnnnnnnnnnnnnnnnnnnnnnnnnnnnnnnnnnnnnnnnnnnnnnnnnnnnnnnnnnnnnnnnnnnnnnnnnnnnnnnnnnnnnnnnnnnnnnnnnnnnnnnnnnnnnnnnnnnnnnnnnnnnnnnnnnnnnnnnnnnnnnnnnnnnnnnnnnnnnnnnnnnnnnnnnnnnnnnnnnnnnnnnnnnnnnnnnnnnnnnnnnnnnnnnnnnnnnnnnnnnnnnnnnnnnnnnnnnnnnnnnnnnnnnnnnnnnnnnnnnnnnnnnnnnnnnnnnnnnnnnnnnnnnnnnnnnnnnnnnnnnnnnnnnnnnnnnnnnnnnnnnnnnnnnnnnnnnnnnnnnnnnnnnnnnnnnnnnnnnnnnnnnnnnnnnnnnnnnnnnnnnnnnnnnnnnnnnnnnnnnnnnnnnnnnnnnnnnnnnnnnnnnnnnnnnnnnnnnnnnnnnnnnnnnnnnnnnnnnnnnnnnnnnnnnnnnnnnnnnnnnnnnnnnnnnnnnnnnnnnnnnnnnnnnnnnnnnnnnnnnnnnnnnnnnnnnnnnnnnnnnnnnnnnnnnnnnnnnnnnnnnnnnnnnnnnnnnnnnnnnnnnnnnnnnnnnnnnnnnnnnnnnnnnnnnnnnnnnnnnnnnnnnnnnnnnnnnnnnnnnnnnnnnnnnnnnnnnnnnnnnnnnnnnnnnnnnnnnnnnnnnnnnnnnnnnnnnnnnnnnnnnnnnnnnnnnnnnnnnnnnnnnnnnnnnnnnnnnnnnnnnnnnnnnnnnnnnnnnnnnnnnnnnnnnnnnnnnnnnnnnnnnnnnnnnnnnnnnnnnnnnnnnnnnnnnnnnnnnnnnnnnnnnnnnnnnnnnnnnnnnnnnnnnnnnnnnnnnnnnnnnnnnnnnnnnnnnnnnnnnnnnnnnnnnnnnnnnnnnnnnnnnnnnnnnnnnnnnnnnnnnnnnnnnnnnnnnnnnnnnnnnnnnnnnnnnnnnnnnnnnnnnnnnnnnnnnnnnnnnnnnnnnnnnnnnnnnnnnnnnnnnnnnnnnnnnnnnnnnnnnnnnnnnnnnnnnnnnnnnnnnnnnnnnnnnnnnnnnnnnnnnnnnnnnnnnnnnnnnnnnnnnnnnnnnnnnnnnnnnnnnnnnnnnnnnnnnnnnnnnnnnnnnnnnnnnnnnnnnnnnnnnnnnnnnnnnnnnnnnnnnnnnnnnnnnnnnnnnnnnnnnnnnnnnnnnnnnnnnnnnnnnnnnnnnnnnnnnnnnnnnnnnnnnnnnnnnnnnnnnnnnnnnnnnnnnnnnnnnnnnnnnnnnnnnnnnnnnnnnnnnnnnnnnnnnnnnnnnnnnnnnnnnnnnnnnnnnnnnnnnnnnnnnnnnnnnnnnnnnnnnnnnnnnnnnnnnnnnnnnnnnnnnnnnnnnnnnnnnnnnnnnnnnnnnnnnnnnnnnnnnnnnnnnnnnnnnnnnnnnnnnnnnnnnnnnnnnnnnnnnnnnnnnnnnnnnnnnnnnnnnnnnnnnnnnnnnnnnnnnnnnnnnnnnnnnnnnnnnnnnnnnnnnnnnnnnnnnnnnnnnnnnnnnnnnnnnnnnnnnnnnnnnnnnnnnnnnnnnnnnnnnnnnnnnnnnnnnnnnnnnnnnnnnnnnnnnnnnnnnnnnnnnnnnnnnnnnnnnnnnnnnnnnnnnnnnnnnnnnnnnnnnnnnnnnnnnnnnnnnnnnnnnnnnnnnnnnnnnnnnnnnnnnnnnnnnnnnnnnnnnnnnnnnnnnnnnnnnnnnnnnnnnnnnnnnnnnnnnnnnnnnnnnnnnnnnnnnnnnnnnnnnnnnnnnnnnnnnnnnnnnnnnnnnnnnnnnnnnnnnnnnnnnnnnnnnnnnnnnnnnnnnnnnnnnnnnnnnnnnnnnnnnnnnnnnnnnnnnnnnnnnnnnnnnnnnnnnnnnnnnnnnnnnnnnnnnnnnnnnnnnnnnnnnnnnnnnnnnnnnnnnnnnnnnnnnnnnnnnnnnnnnnnnnnnnnnnnnnnnnnnnnnnnnnnnnnnnnnnnnnnnnnnnnnnnnnnnnnnnnnnnnnnnnnnnnnnnnnnnnnnnnnnnnnnnnnnnnnnnnnnnnnnnnnnnnnnnnnnnnnnnnnnnnnnnnnnnnnnnnnnnnnnnnnnnnnnnnnnnnnnnnnnnnnnnnnnnnnnnnnnnnnnnnnnnnnnnnnnnnnnnnnnnnnnnnnnnnnnnnnnnnnnnnnnnnnnnnnnnnnnnnnnnnnnnnnnnnnnnnnnnnnnnnnnnnnnnnnnnnnnnnnnnnnnnnnnnnnnnnnnnnnnnnnnnnnnnnnnnnnnnnnnnnnnnnnnnnnnnnnnnnnnnnnnnnnnnnnnnnnnnnnnnnnnnnnnnnnnnnnnnnnnnnnnnnnnnnnnnnnnnnnnnnnnnnnnnnnnnnnnnnnnnnnnnnnnnnnnnnnnnnnnnnnnnnnnnnnnnnnnnnnnnnnnnnnnnnnnnnnnnnnnnnnnnnnnnnnnnnnnnnnnnnnnnnnnnnnnnnnnnnnnnnnnnnnnnnnnnnnnnnnnnnnnnnnnnnnnnnnnnnnnnnnnnnnnnnnnnnnnnnnnnnnnnnnnnnnnnnnnnnnnnnnnnnnnnnnnnnnnnnnnnnnnnnnnnnnnnnnnnnnnnnnnnnnnnnnnnnnnnnnnnnnnnnnnnnnnnnnnnnnnnnnnnnnnnnnnnnnnnnnnnnnnnnnnnnnnnnnnnnnnnnnnnnnnnnnnnnnnnnnnnnnnnnnnnnnnnnnnnnnnnnnnnnnnnnnnnnnnnnnnnnnnnnnnnnnnnnnnnnnnnnnnnnnnnnnnnnnnnnnnnnnnnnnnnnnnnnnnnnnnnnnnnnnnnnnnnnnnnnnnnnnnnnnnnnnnnnnnnnnnnnnnnnnnnnnnnnnnnnnnnnnnnnnnnnnnnnnnnnnnnnnnnnnnnnnnnnnnnnnnnnnnnnnnnnnnnnnnnnnnnnnnnnnnnnnnnnnnnnnnnnnnnnnnnnnnnnnnnnnnnnnnnnnnnnnnnnnnnnnnnnnnnnnnnnnnnnnnnnnnnnnnnnnnnnnnnnnnnnnnnnnnnnnnnnnnnnnnnnnnnnnnnnnnnnnnnnnnnnnnnnnnnnnnnnnnnnnnnnnnnnnnnnnnnnnnnnnnnnnnnnnnnnnnnnnnnnnnnnnnnnnnnnnnnnnnnnnnnnnnnnnnnnnnnnnnnnnnnnnnnnnnnnnnnnnnnnnnnnnnnnnnnnnnnnnnnnnnnnnnnnnnnnnnnnnnnnnnnnnnnnnnnnnnnnnnnnnnnnnnnnnnnnnnnnnnnnnnnnnnnnnnnnnnnnnnnnnnnnnnnnnnnnnnnnnnnnnnnnnnnnnnnnnnnnnnnnnnnnnnnnnnnnnnnnnnnnnnnnnnnnnnnnnnnnnnnnnnnnnnnnnnnnnnnnnnnnnnnnnnnnnnnnnnnnnnnnnnnnnnnnnnnnnnnnnnnnnnnnnnnnnnnnnnnnnnnnnnnnnnnnnnnnnnnnnnnnnnnnnnnnnnnnnnnnnnnnnnnnnnnnnnnnnnnnnnnnnnnnnnnnnnnnnnnnnnnnnnnnnnnnnnnnnnnnnnnnnnnnnnnnnnnnnnnnnnnnnnnnnnnnnnnnnnnnnnnnnnnnnnnnnnnnnnnnnnnnnnnnnnnnnnnnnnnnnnnnnnnnnnnnnnnnnnnnnnnnnnnnnnnnnnnnnnnnnnnnnnnnnnnnnnnnnnnnnnnnnnnnnnnnnnnnnnnnnnnnnnnnnnnnnnnnnnnnnnnnnnnnnnnnnnnnnnnnnnnnnnnnnnnnnnnnnnnnnnnnnnnnnnnnnnnnnnnnnnnnnnnnnnnnnnnnnnnnnnnnnnnnnnnnnnnnnnnnnnnnnnnnnnnnnnnnnnnnnnnnnnnnnnnnnnnnnnnnnnnnnnnnnnnnnnnnnnnnnnnnnnnnnnnnnnnnnnnnnnnnnnnnnnnnnnnnnnnnnnnnnnnnnnnnnnnnnnnnnnnnnnnnnnnnnnnnnnnnnnnnnnnnnnnnnnnnnnnnnnnnnnnnnnnnnnnnnnnnnnnnnnnnnnnnnnnnnnnnnnnnnnnnnnnnnnnnnnnnnnnnnnnnnnnnnnnnnnnnnnnnnnnnnnnnnnnnnnnnnnnnnnnnnnnnnnnnnnnnnnnnnnnnnnnnnnnnnnnnnnnnnnnnnnnnnnnnnnnnnnnnnnnnnnnnnnnnnnnnnnnnnnnnnnnnnnnnnnnnnnnnnnnnnnnnnnnnnnnnnnnnnnnnnnnnnnnnnnnnnnnnnnnnnnnnnnnnnnnnnnnnnnnnnnnnnnnnnnnnnnnnnnnnnnnnnnnnnnnnnnnnnnnnnnnnnnnnnnnnnnnnnnnnnnnnnnnnnnnnnnnnnnnnnnnnnnnnnnnnnnnnnnnnnnnnnnnnnnnnnnnnnnnnnnnnnnnnnnnnnnnnnnnnnnnnnnnnnnnnnnnnnnnnnnnnnnnnnnnnnnnnnnnnnnnnnnnnnnnnnnnnnnnnnnnnnnnnnnnnnnnnnnnnnnnnnnnnnnnnnnnnnnnnnnnnnnnnnnnnnnnnnnnnnnnnnnnnnnnnnnnnnnnnnnnnnnnnnnnnnnnnnnnnnnnnnnnnnnnnnnnnnnnnnnnnnnnnnnnnnnnnnnnnnnnnnnnnnnnnnnnnnnnnnnnnnnnnnnnnnnnnnnnnnnnnnnnnnnnnnnnnnnnnnnnnnnnnnnnnnnnnnnnnnnnnnnnnnnnnnnnnnnnnnnnnnnnnnnnnnnnnnnnnnnnnnnnnnnnnnnnnnnnnnnnnnnnnnnnnnnnnnnnnnnnnnnnnnnnnnnnnnnnnnnnnnnnnnnnnnnnnnnnnnnnnnnnnnnnnnnnnnnnnnnnnnnnnnnnnnnnnnnnnnnnnnnnnnnnnnnnnnnnnnnnnnnnnnnnnnnnnnnnnnnnnnnnnnnnnnnnnnnnnnnnnnnnnnnnnnnnnnnnnnnnnnnnnnnnnnnnnnnnnnnnnnnnnnnnnnnnnnnnnnnnnnnnnnnnnnnnnnnnnnnnnnnnnnnnnnnnnnnnnnnnnnnnnnnnnnnnnnnnnnnnnnnnnnnnnnnnnnnnnnnnnnnnnnnnnnnnnnnnnnnnnnnnnnnnnnnnnnnnnnnnnnnnnnnnnnnnnnnnnnnnnnnnnnnnnnnnnnnnnnnnnnnnnnnnnnnnnnnnnnnnnnnnnnnnnnnnnnnnnnnnnnnnnnnnnnnnnnnnnnnnnnnnnnnnnnnnnnnnnnnnnnnnnnnnnnnnnnnnnnnnnnnnnnnnnnnnnnnnnnnnnnnnnnnnnnnnnnnnnnnnnnnnnnnnnnnnnnnnnnnnnnnnnnnnnnnnnnnnnnnnnnnnnnnnnnnnnnnnnnnnnnnnnnnnnnnnnnnnnnnnnnnnnnnnnnnnnnnnnnnnnnnnnnnnnnnnnnnnnnnnnnnnnnnnnnnnnnnnnnnnnnnnnnnnnnnnnnnnnnnnnnnnnnnnnnnnnnnnnnnnnnnnnnnnnnnnnnnnnnnnnnnnnnnnnnnnnnnnnnnnnnnnnnnnnnnnnnnnnnnnnnnnnnnnnnnnnnnnnnnnnnnnnnnnnnnnnnnnnnnnnnnnnnnnnnnnnnnnnnnnnnnnnnnnnnnnnnnnnnnnnnnnnnnnnnnnnnnnnnnnnnnnnnnnnnnnnnnnnnnnnnnnnnnnnnnnnnnnnnnnnnnnnnnnnnnnnnnnnnnnnnnnnnnnnnnnnnnnnnnnnnnnnnnnnnnnnnnnnnnnnnnnnnnnnnnnnnnnnnnnnnnnnnnnnnnnnnnnnnnnnnnnnnnnnnnnnnnnnnnnnnnnnnnnnnnnnnnnnnnnnnnnnnnnnnnnnnnnnnnnnnnnnnnnnnnnnnnnnnnnnnnnnnnnnnnnnnnnnnnnnnnnnnnnnnnnnnnnnnnnnnnnnnnnnnnnnnnnnnnnnnnnnnnnnnnnnnnnnnnnnnnnnnnnnnnnnnnnnnnnnnnnnnnnnnnnnnnnnnnnnnnnnnnnnnnnnnnnnnnnnnnnnnnnnnnnnnnnnnnnnnnnnnnnnnnnnnnnnnnnnnnnnnnnnnnnnnnnnnnnnnnnnnnnnnnnnnnnnnnnnnnnnnnnnnnnnnnnnnnnnnnnnnnnnnnnnnnnnnnnnnnnnnnnnnnnnnnnnnnnnnnnnnnnnnnnnnnnnnnnnnnnnnnnnnnnnnnnnnnnnnnnnnnnnnnnnnnnnnnnnnnnnnnnnnnnnnnnnnnnnnnnnnnnnnnnnnnnnnnnnnnnnnnnnnnnnnnnnnnnnnnnnnnnnnnnnnnnnnnnnnnnnnnnnnnnnnnnnnnnnnnnnnnnnnnnnnnnnnnnnnnnnnnnnnnnnnnnnnnnnnnnnnnnnnnnnnnnnnnnnnnnnnnnnnnnnnnnnnnnnnnnnnnnnnnnnnnnnnnnnnnnnnnnnnnnnnnnnnnnnnnnnnnnnnnnnnnnnnnnnnnnnnnnnnnnnnnnnnnnnnnnnnnnnnnnnnnnnnnnnnnnnnnnnnnnnnnnnnnnnnnnnnnnnnnnnnnnnnnnnnnnnnnnnnnnnnnnnnnnnnnnnnnnnnnnnnnnnnnnnnnnnnnnnnnnnnnnnnnnnnnnnnnnnnnnnnnnnnnnnnnnnnnnnnnnnnnnnnnnnnnnnnnnnnnnnnnnnnnnnnnnnnnnnnnnnnnnnnnnnnnnnnnnnnnnnnnnnnnnnnnnnnnnnnnnnnnnnnnnnnnnnnnnnnnnnnnnnnnnnnnnnnnnnnnnnnnnnnnnnnnnnnnnnnnnnnnnnnnnnnnnnnnnnnnnnnnnnnnnnnnnnnnnnnnnnnnnnnnnnnnnnnnnnnnnnnnnnnnnnnnnnnnnnnnnnnnnnnnnnnnnnnnnnnnnnnnnnnnnnnnnnnnnnnnnnnnnnnnnnnnnnnnnnnnnnnnnnnnnnnnnnnnnnnnnnnnnnnnnnnnnnnnnnnnnnnnnnnnnnnnnnnnnnnnnnnnnnnnnnnnnnnnnnnnnnnnnnnnnnnnnnnnnnnnnnnnnnnnnnnnnnnnnnnnnnnnnnnnnnnnnnnnnnnnnnnnnnnnnnnnnnnnnnnnnnnnnnnnnnnnnnnnnnnnnnnnnnnnnnnnnnnnnnnnnnnnnnnnnnnnnnnnnnnnnnnnnnnnnnnnnnnnnnnnnnnnnnnnnnnnnnnnnnnnnnnnnnnnnnnnnnnnnnnnnnnnnnnnnnnnnnnnnnnnnnnnnnnnnnnnnnnnnnnnnnnnnnnnnnnnnnnnnnnnnnnnnnnnnnnnnnnnnnnnnnnnnnnnnnnnnnnnnnnnnnnnnnnnnnnnnnnnnnnnnnnnnnnnnnnnnnnnnnnnnnnnnnnnnnnnnnnnnnnnnnnnnnnnnnnnnnnnnnnnnnnnnnnnnnnnnnnnnnnnnnnnnnnnnnnnnnnnnnnnnnnnnnnnnnnnnnnnnnnnnnnnnnnnnnnnnnnnnnnnnnnnnnnnnnnnnnnnnnnnnnnnnnnnnnnnnnnnnnnnnnnnnnnnnnnnnnnnnnnnnnnnnnnnnnnnnnnnnnnnnnnnnnnnnnnnnnnnnnnnnnnnnnnnnnnnnnnnnnnnnnnnnnnnnnnnnnnnnnnnnnnnnnnnnnnnnnnnnnnnnnnnnnnnnnnnnnnnnnnnnnnnnnnnnnnnnnnnnnnnnnnnnnnnnnnnnnnnnnnnnnnnnnnnnnnnnnnnnnnnnnnnnnnnnnnnnnnnnnnnnnnnnnnnnnnnnnnnnnnnnnnnnnnnnnnnnnnnnnnnnnnnnnnnnnnnnnnnnnnnnnnnnnnnnnnnnnnnnnnnnnnnnnnnnnnnnnnnnnnnnnnnnnnnnnnnnnnnnnnnnnnnnnnnnnnnnnnnnnnnnnnnnnnnnnnnnnnnnnnnnnnnnnnnnnnnnnnnnnnnnnnnnnnnnnnnnnnnnnnnnnnnnnnnnnnnnnnnnnnnnnnnnnnnnnnnnnnnnnnnnnnnnnnnnnnnnnnnnnnnnnnnnnnnnnnnnnnnnnnnnnnnnnnnnnnnnnnnnnnnnnnnnnnnnnnnnnnnnnnnnnnnnnnnnnnnnnnnnnnnnnnnnnnnnnnnnnnnnnnnnnnnnnnnnnnnnnnnnnnnnnnnnnnnnnnnnnnnnnnnnnnnnnnnnnnnnnnnnnnnnnnnnnnnnnnnnnnnnnnnnnnnnnnnnnnnnnnnnnnnnnnnnnnnnnnnnnnnnnnnnnnnnnnnnnnnnnnnnnnnnnnnnnnnnnnnnnnnnnnnnnnnnnnnnnnnnnnnnnnnnnnnnnnnnnnnnnnnnnnnnnnnnnnnnnnnnnnnnnnnnnnnnnnnnnnnnnnnnnnnnnnnnnnnnnnnnnnnnnnnnnnnnnnnnnnnnnnnnnnnnnnnnnnnnnnnnnnnnnnnnnnnnnnnnnnnnnnnnnnnnnnnnnnnnnnnnnnnnnnnnnnnnnnnnnnnnnnnnnnnnnnnnnnnnnnnnnnnnnnnnnnnnnnnnnnnnnnnnnnnnnnnnnnnnnnnnnnnnnnnnnnnnnnnnnnnnnnnnnnnnnnnnnnnnnnnnnnnnnnnnnnnnnnnnnnnnnnnnnnnnnnnnnnnnnnnnnnnnnnnnnnnnnnnnnnnnnnnnnnnnnnnnnnnnnnnnnnnnnnnnnnnnnnnnnnnnnnnnnnnnnnnnnnnnnnnnnnnnnnnnnnnnnnnnnnnnnnnnnnnnnnnnnnnnnnnnnnnnnnnnnnnnnnnnnnnnnnnnnnnnnnnnnnnnnnnnnnnnnnnnnnnnnnnnnnnnnnnnnnnnnnnnnnnnnnnnnnnnnnnnnnnnnnnnnnnnnnnnnnnnnnnnnnnnnnnnnnnnnnnnnnnnnnnnnnnnnnnnnnnnnnnnnnnnnnnnnnnnnnnnnnnnnnnnnnnnnnnnnnnnnnnnnnnnnnnnnnnnnnnnnnnnnnnnnnnnnnnnnnnnnnnnnnnnnnnnnnnnnnnnnnnnnnnnnnnnnnnnnnnnnnnnnnnnnnnnnnnnnnnnnnnnnnnnnnnnnnnnnnnnnnnnnnnnnnnnnnnnnnnnnnnnnnnnnnnnnnnnnnnnnnnnnnnnnnnnnnnnnnnnnnnnnnnnnnnnnnnnnnnnnnnnnnnnnnnnnnnnnnnnnnnnnnnnnnnnnnnnnnnnnnnnnnnnnnnnnnnnnnnnnnnnnnnnnnnnnnnnnnnnnnnnnnnnnnnnnnnnnnnnnnnnnnnnnnnnnnnnnnnnnnnnnnnnnnnnnnnnnnnnnnnnnnnnnnnnnnnnnnnnnnnnnnnnnnnnnnnnnnnnnnnnnnnnnnnnnnnnnnnnnnnnnnnnnnnnnnnnnnnnnnnnnnnnnnnnnnnnnnnnnnnnnnnnnnnnnnnnnnnnnnnnnnnnnnnnnnnnnnnnnnnnnnnnnnnnnnnnnnnnnnnnnnnnnnnnnnnnnnnnnnnnnnnnnnnnnnnnnnnnnnnnnnnnnnnnnnnnnnnnnnnnnnnnnnnnnnnnnnnnnnnnnnnnnnnnnnnnnnnnnnnnnnnnnnnnnnnnnnnnnnnnnnnnnnnnnnnnnnnnnnnnnnnnnnnnnnnnnnnnnnnnnnnnnnnnnnnnnnnnnnnnnnnnnnnnnnnnnnnnnnnnnnnnnnnnnnnnnnnnnnnnnnnnnnnnnnnnnnnnnnnnnnnnnnnnnnnnnnnnnnnnnnnnnnnnnnnnnnnnnnnnnnnnnnnnnnnnnnnnnnnnnnnnnnnnnnnnnnnnnnnnnnnnnnnnnnnnnnnnnnnnnnnnnnnnnnnnnnnnnnnnnnnnnnnnnnnnnnnnnnnnnnnnnnnnnnnnnnnnnnnnnnnnnnnnnnnnnnnnnnnnnnnnnnnnnnnnnnnnnnnnnnnnnnnnnnnnnnnnnnnnnnnnnnnnnnnnnnnnnnnnnnnnnnnnnnnnnnnnnnnnnnnnnnnnnnnnnnnnnnnnnnnnnnnnnnnnnnnnnnnnnnnnnnnnnnnnnnnnnnnnnnnnnnnnnnnnnnnnnnnnnnnnnnnnnnnnnnnnnnnnnnnnnnnnnnnnnnnnnnnnnnnnnnnnnnnnnnnnnnnnnnnnnnnnnnnnnnnnnnnnnnnnnnnnnnnnnnnnnnnnnnnnnnnnnnnnnnnnnnnnnnnnnnnnnnnnnnnnnnnnnnnnnnnnnnnnnnnnnnnnnnnnnnnnnnnnnnnnnnnnnnnnnnnnnnnnnnnnnnnnnnnnnnnnnnnnnnnnnnnnnnnnnnnnnnnnnnnnnnnnnnnnnnnnnnnnnnnnnnnnnnnnnnnnnnnnnnnnnnnnnnnnnnnnnnnnnnnnnnnnnnnnnnnnnnnnnnnnnnnnnnnnnnnnnnnnnnnnnnnnnnnnnnnnnnnnnnnnnnnnnnnnnnnnnnnnnnnnnnnnnnnnnnnnnnnnnnnnnnnnnnnnnnnnnnnnnnnnnnnnnnnnnnnnnnnnnnnnnnnnnnnnnnnnnnnnnnnnnnnnnnnnnnnnnnnnnnnnnnnnnnnnnnnnnnnnnnnnnnnnnnnnnnnnnnnnnnnnnnnnnnnnnnnnnnnnnnnnnnnnnnnnnnnnnnnnnnnnnnnnnnnnnnnnnnnnnnnnnnnnnnnnnnnnnnnnnnnnnnnnnnnnnnnnnnnnnnnnnnnnnnnnnnnnnnnnnnnnnnnnnnnnnnnnnnnnnnnnnnnnnnnnnnnnnnnnnnnnnnnnnnnnnnnnnnnnnnnnnnnnnnnnnnnnnnnnnnnnnnnnnnnnnnnnnnnnnnnnnnnnnnnnnnnnnnnnnnnnnnnnnnnnnnnnnnnnnnnnnnnnnnnnnnnnnnnnnnnnnnnnnnnnnnnnnnnnnnnnnnnnnnnnnnnnnnnnnnnnnnnnnnnnnnnnnnnnnnnnnnnnnnnnnnnnnnnnnnnnnnnnnnnnnnnnnnnnnnnnnnnnnnnnnnnnnnnnnnnnnnnnnnnnnnnnnnnnnnnnnnnnnnnnnnnnnnnnnnnnnnnnnnnnnnnnnnnnnnnnnnnnnnnnnnnnnnnnnnnnnnnnnnnnnnnnnnnnnnnnnnnnnnnnnnnnnnnnnnnnnnnnnnnnnnnnnnnnnnnnnnnnnnnnnnnnnnnnnnnnnnnnnnnnnnnnnnnnnnnnnnnnnnnnnnnnnnnnnnnnnnnnnnnnnnnnnnnnnnnnnnnnnnnnnnnnnnnnnnnnnnnnnnnnnnnnnnnnnnnnnnnnnnnnnnnnnnnnnnnnnnnnnnnnnnnnnnnnnnnnnnnnnnnnnnnnnnnnnnnnnnnnnnnnnnnnnnnnnnnnnnnnnnnnnnnnnnnnnnnnnnnnnnnnnnnnnnnnnnnnnnnnnnnnnnnnnnnnnnnnnnnnnnnnnnnnnnnnnnnnnnnnnnnnnnnnnnnnnnnnnnnnnnnnnnnnnnnnnnnnnnnnnnnnnnnnnnnnnnnnnnnnnnnnnnnnnnnnnnnnnnnnnnnnnnnnnnnnnnnnnnnnnnnnnnnnnnnnnnnnnnnnnnnnnnnnnnnnnnnnnnnnnnnnnnnnnnnnnnnnnnnnnnnnnnnnnnnnnnnnnnnnnnnnnnnnnnnnnnnnnnnnnnnnnnnnnnnnnnnnnnnnnnnnnnnnnnnnnnnnnnnnnnnnnnnnnnnnnnnnnnnnnnnnnnnnnnnnnnnnnnnnnnnnnnnnnnnnnnnnnnnnnnnnnnnnnnnnnnnnnnnnnnnnnnnnnnnnnnnnnnnnnnnnnnnnnnnnnnnnnnnnnnnnnnnnnnnnnnnnnnnnnnnnnnnnnnnnnnnnnnnnnnnnnnnnnnnnnnnnnnnnnnnnnnnnnnnnnnnnnnnnnnnnnnnnnnnnnnnnnnnnnnnnnnnnnnnnnnnnnnnnnnnnnnnnnnnnnnnnnnnnnnnnnnnnnnnnnnnnnnnnnnnnnnnnnnnnnnnnnnnnnnnnnnnnnnnnnnnnnnnnnnnnnnnnnnnnnnnnnnnnnnnnnnnnnnnnnnnnnnnnnnnnnnnnnnnnnnnnnnnnnnnnnnnnnnnnnnnnnnnnnnnnnnnnnnnnnnnnnnnnnnnnnnnnnnnnnnnnnnnnnnnnnnnnnnnnnnnnnnnnnnnnnnnnnnnnnnnnnnnnnnnnnnnnnnnnnnnnnnnnnnnnnnnnnnnnnnnnnnnnnnnnnnnnnnnnnnnnnnnnnnnnnnnnnnnnnnnnnnnnnnnnnnnnnnnnnnnnnnnnnnnnnnnnnnnnnnnnnnnnnnnnnnnnnnnnnnnnnnnnnnnnnnnnnnnnnnnnnnnnnnnnnnnnnnnnnnnnnnnnnnnnnnnnnnnnnnnnnnnnnnnnnnnnnnnnnnnnnnnnnnnnnnnnnnnnnnnnnnnnnnnnnnnnnnnnnnnnnnnnnnnnnnnnnnnnnnnnnnnnnnnnnnnnnnnnnnnnnnnnnnnnnnnnnnnnnnnnnnnnnnnnnnnnnnnnnnnnnnnnnnnnnnnnnnnnnnnnnnnnnnnnnnnnnnnnnnnnnnnnnnnnnnnnnnnnnnnnnnnnnnnnnnnnnnnnnnnnnnnnnnnnnnnnnnnnnnnnnnnnnnnnnnnnnnnnnnnnnnnnnnnnnnnnnnnnnnnnnnnnnnnnnnnnnnnnnnnnnnnnnnnnnnnnnnnnnnnnnnnnnnnnnnnnnnnnnnnnnnnnnnnnnnnnnnnnnnnnnnnnnnnnnnnnnnnnnnnnnnnnnnnnnnnnnnnnnnnnnnnnnnnnnnnnnnnnnnnnnnnnnnnnnnnnnnnnnnnnnnnnnnnnnnnnnnnnnnnnnnnnnnnnnnnnnnnnnnnnnnnnnnnnnnnnnnnnnnnnnnnnnnnnnnnnnnnnnnnnnnnnnnnnnnnnnnnnnnnnnnnnnnnnnnnnnnnnnnnnnnnnnnnnnnnnnnnnnnnnnnnnnnnnnnnnnnnnnnnnnnnnnnnnnnnnnnnnnnnnnnnnnnnnnnnnnnnnnnnnnnnnnnnnnnnnnnnnnnnnnnnnnnnnnnnnnnnnnnnnnnnnnnnnnnnnnnnnnnnnnnnnnnnnnnnnnnnnnnnnnnnnnnnnnnnnnnnnnnnnnnnnnnnnnnnnnnnnnnnnnnnnnnnnnnnnnnnnnnnnnnnnnnnnnnnnnnnnnnnnnnnnnnnnnnnnnnnnnnnnnnnnnnnnnnnnnnnnnnnnnnnnnnnnnnnnnnnnnnnnnnnnnnnnnnnnnnnnnnnnnnnnnnnnnnnnnnnnnnnnnnnnnnnnnnnnnnnnnnnnnnnnnnnnnnnnnnnnnnnnnnnnnnnnnnnnnnnnnnnnnnnnnnnnnnnnnnnnnnnnnnnnnnnnnnnnnnnnnnnnnnnnnnnnnnnnnnnnnnnnnnnnnnnnnnnnnnnnnnnnnnnnnnnnnnnnnnnnnnnnnnnnnnnnnnnnnnnnnnnnnnnnnnnnnnnnnnnnnnnnnnnnnnnnnnnnnnnnnnnnnnnnnnnnnnnnnnnnnnnnnnnnnnnnnnnnnnnnnnnnnnnnnnnnnnnnnnnnnnnnnnnnnnnnnnnnnnnnnnnnnnnnnnnnnnnnnnnnnnnnnnnnnnnnnnnnnnnnnnnnnnnnnnnnnnnnnnnnnnnnnnnnnnnnnnnnnnnnnnnnnnnnnnnnnnnnnnnnnnnnnnnnnnnnnnnnnnnnnnnnnnnnnnnnnnnnnnnnnnnnnnnnnnnnnnnnnnnnnnnnnnnnnnnnnnnnnnnnnnnnnnnnnnnnnnnnnnnnnnnnnnnnnnnnnnnnnnnnnnnnnnnnnnnnnnnnnnnnnnnnnnnnnnnnnnnnnnnnnnnnnnnnnnnnnnnnnnnnnnnnnnnnnnnnnnnnnnnnnnnnnnnnnnnnnnnnnnnnnnnnnnnnnnnnnnnnnnnnnnnnnnnnnnnnnnnnnnnnnnnnnnnnnnnnnnnnnnnnnnnnnnnnnnnnnnnnnnnnnnnnnnnnnnnnnnnnnnnnnnnnnnnnnnnnnnnnnnnnnnnnnnnnnnnnnnnnnnnnnnnnnnnnnnnnnnnnnnnnnnnnnnnnnnnnnnnnnnnnnnnnnnnnnnnnnnnnnnnnnnnnnnnnnnnnnnnnnnnnnnnnnnnnnnnnnnnnnnnnnnnnnnnnnnnnnnnnnnnnnnnnnnnnnnnnnnnnnnnnnnnnnnnnnnnnnnnnnnnnnnnnnnnnnnnnnnnnnnnnnnnnnnnnnnnnnnnnnnnnnnnnnnnnnnnnnnnnnnnnnnnnnnnnnnnnnnnnnnnnnnnnnnnnnnnnnnnnnnnnnnnnnnnnnnnnnnnnnnnnnnnnnnnnnnnnnnnnnnnnnnnnnnnnnnnnnnnnnnnnnnnnnnnnnnnnnnnnnnnnnnnnnnnnnnnnnnnnnnnnnnnnnnnnnnnnnnnnnnnnnnnnnnnnnnnnnnnnnnnnnnnnnnnnnnnnnnnnnnnnnnnnnnnnnnnnnnnnnnnnnnnnnnnnnnnnnnnnnnnnnnnnnnnnnnnnnnnnnnnnnnnnnnnnnnnnnnnnnnnnnnnnnnnnnnnnnnnnnnnnnnnnnnnnnnnnnnnnnnnnnnnnnnnnnnnnnnnnnnnnnnnnnnnnnnnnnnnnnnnnnnnnnnnnnnnnnnnnnnnnnnnnnnnnnnnnnnnnnnnnnnnnnnnnnnnnnnnnnnnnnnnnnnnnnnnnnnnnnnnnnnnnnnnnnnnnnnnnnnnnnnnnnnnnnnnnnnnnnnnnnnnnnnnnnnnnnnnnnnnnnnnnnnnnnnnnnnnnnnnnnnnnnnnnnnnnnnnnnnnnnnnnnnnnnnnnnnnnnnnnnnnnnnnnnnnnnnnnnnnnnnnnnnnnnnnnnnnnnnnnnnnnnnnnnnnnnnnnnnnnnnnnnnnnnnnnnnnnnnnnnnnnnnnnnnnnnnnnnnnnnnnnnnnnnnnnnnnnnnnnnnnnnnnnnnnnnnnnnnnnnnnnnnnnnnnnnnnnnnnnnnnnnnnnnnnnnnnnnnnnnnnnnnnnnnnnnnnnnnnnnnnnnnnnnnnnnnnnnnnnnnnnnnnnnnnnnnnnnnnnnnnnnnnnnnnnnnnnnnnnnnnnnnnnnnnnnnnnnnnnnnnnnnnnnnnnnnnnnnnnnnnnnnnnnnnnnnnnnnnnnnnnnnnnnnnnnnnnnnnnnnnnnnnnnnnnnnnnnnnnnnnnnnnnnnnnnnnnnnnnnnnnnnnnnnnnnnnnnnnnnnnnnnnnnnnnnnnnnnnnnnnnnnnnnnnnnnnnnnnnnnnnnnnnnnnnnnnnnnnnnnnnnnnnnnnnnnnnnnnnnnnnnnnnnnnnnnnnnnnnnnnnnnnnnnnnnnnnnnnnnnnnnnnnnnnnnnnnnnnnnnnnnnnnnnnnnnnnnnnnnnnnnnnnnnnnnnnnnnnnnnnnnnnnnnnnnnnnnnnnnnnnnnnnnnnnnnnnnnnnnnnnnnnnnnnnnnnnnnnnnnnnnnnnnnnnnnnnnnnnnnnnnnnnnnnnnnnnnnnnnnnnnnnnnnnnnnnnnnnnnnnnnnnnnnnnnnnnnnnnnnnnnnnnnnnnnnnnnnnnnnnnnnnnnnnnnnnnnnnnnnnnnnnnnnnnnnnnnnnnnnnnnnnnnnnnnnnnnnnnnnnnnnnnnnnnnnnnnnnnnnnnnnnnnnnnnnnnnnnnnnnnnnnnnnnnnnnnnnnnnnnnnnnnnnnnnnnnnnnnnnnnnnnnnnnnnnnnnnnnnnnnnnnnnnnnnnnnnnnnnnnnnnnnnnnnnnnnnnnnnnnnnnnnnnnnnnnnnnnnnnnnnnnnnnnnnnnnnnnnnnnnnnnnnnnnnnnnnnnnnnnnnnnnnnnnnnnnnnnnnnnnnnnnnnnnnnnnnnnnnnnnnnnnnnnnnnnnnnnnnnnnnnnnnnnnnnnnnnnnnnnnnnnnnnnnnnnnnnnnnnnnnnnnnnnnnnnnnnnnnnnnnnnnnnnnnnnnnnnnnnnnnnnnnnnnnnnnnnnnnnnnnnnnnnnnnnnnnnnnnnnnnnnnnnnnnnnnnnnnnnnnnnnnnnnnnnnnnnnnnnnnnnnnnnnnnnnnnnnnnnnnnnnnnnnnnnnnnnnnnnnnnnnnnnnnnnnnnnnnnnnnnnnnnnnnnnnnnnnnnnnnnnnnnnnnnnnnnnnnnnnnnnnnnnnnnnnnnnnnnnnnnnnnnnnnnnnnnnnnnnnnnnnnnnnnnnnnnnnnnnnnnnnnnnnnnnnnnnnnnnnnnnnnnnnnnnnnnnnnnnnnnnnnnnnnnnnnnnnnnnnnnnnnnnnnnnnnnnnnnnnnnnnnnnnnnnnnnnnnnnnnnnnnnnnnnnnnnnnnnnnnnnnnnnnnnnnnnnnnnnnnnnnnnnnnnnnnnnnnnnnnnnnnnnnnnnnnnnnnnnnnnnnnnnnnnnnnnnnnnnnnnnnnnnnnnnnnnnnnnnnnnnnnnnnnnnnnnnnnnnnnnnnnnnnnnnnnnnnnnnnnnnnnnnnnnnnnnnnnnnnnnnnnnnnnnnnnnnnnnnnnnnnnnnnnnnnnnnnnnnnnnnnnnnnnnnnnnnnnnnnnnnnnnnnnnnnnnnnnnnnnnnnnnnnnnnnnnnnnnnnnnnnnnnnnnnnnnnnnnnnnnnnnnnnnnnnnnnnnnnnnnnnnnnnnnnnnnnnnnnnnnnnnnnnnnnnnnnnnnnnnnnnnnnnnnnnnnnnnnnnnnnnnnnnnnnnnnnnnnnnnnnnnnnnnnnnnnnnnnnnnnnnnnnnnnnnnnnnnnnnnnnnnnnnnnnnnnnnnnnnnnnnnnnnnnnnnnnnnnnnnnnnnnnnnnnnnnnnnnnnnnnnnnnnnnnnnnnnnnnnnnnnnnnnnnnnnnnnnnnnnnnnnnnnnnnnnnnnnnnnnnnnnnnnnnnnnnnnnnnnnnnnnnnnnnnnnnnnnnnnnnnnnnnnnnnnnnnnnnnnnnnnnnnnnnnnnnnnnnnnnnnnnnnnnnnnnnnnnnnnnnnnnnnnnnnnnnnnnnnnnnnnnnnnnnnnnnnnnnnnnnnnnnnnnnnnnnnnnnnnnnnnnnnnnnnnnnnnnnnnnnnnnnnnnnnnnnnnnnnnnnnnnnnnnnnnnnnnnnnnnnnnnnnnnnnnnnnnnnnnnnnnnnnnnnnnnnnnnnnnnnnnnnnnnnnnnnnnnnnnnnnnnnnnnnnnnnnnnnnnnnnnnnnnnnnnnnnnnnnnnnnnnnnnnnnnnnnnnnnnnnnnnnnnnnnnnnnnnnnnnnnnnnnnnnnnnnnnnnnnnnnnnnnnnnnnnnnnnnnnnnnnnnnnnnnnnnnnnnnnnnnnnnnnnnnnnnnnnnnnnnnnnnnnnnnnnnnnnnnnnnnnnnnnnnnnnnnnnnnnnnnnnnnnnnnnnnnnnnnnnnnnnnnnnnnnnnnnnnnnnnnnnnnnnnnnnnnnnnnnnnnnnnnnnnnnnnnnnnnnnnnnnnnnnnnnnnnnnnnnnnnnnnnnnnnnnnnnnnnnnnnnnnnnnnnnnnnnnnnnnnnnnnnnnnnnnnnnnnnnnnnnnnnnnnnnnnnnnnnnnnnnnnnnnnnnnnnnnnnnnnnnnnnnnnnnnnnnnnnnnnnnnnnnnnnnnnnnnnnnnnnnnnnnnnnnnnnnnnnnnnnnnnnnnnnnnnnnnnnnnnnnnnnnnnnnnnnnnnnnnnnnnnnnnnnnnnnnnnnnnnnnnnnnnnnnnnnnnnnnnnnnnnnnnnnnnnnnnnnnnnnnnnnnnnnnnnnnnnnnnnnnnnnnnnnnnnnnnnnnnnnnnnnnnnnnnnnnnnnnnnnnnnnnnnnnnnnnnnnnnnnnnnnnnnnnnnnnnnnnnnnnnnnnnnnnnnnnnnnnnnnnnnnnnnnnnnnnnnnnnnnnnnnnnnnnnnnnnnnnnnnnnnnnnnnnnnnnnnnnnnnnnnnnnnnnnnnnnnnnnnnnnnnnnnnnnnnnnnnnnnnnnnnnnnnnnnnnnnnnnnnnnnnnnnnnnnnnnnnnnnnnnnnnnnnnnnnnnnnnnnnnnnnnnnnnnnnnnnnnnnnnnnnnnnnnnnnnnnnnnnnnnnnnnnnnnnnnnnnnnnnnnnnnnnnnnnnnnnnnnnnnnnnnnnnnnnnnnnnnnnnnnnnnnnnnnnnnnnnnnnnnnnnnnnnnnnnnnnnnnnnnnnnnnnnnnnnnnnnnnnnnnnnnnnnnnnnnnnnnnnnnnnnnnnnnnnnnnnnnnnnnnnnnnnnnnnnnnnnnnnnnnnnnnnnnnnnnnnnnnnnnnnnnnnnnnnnnnnnnnnnnnnnnnnnnnnnnnnnnnnnnnnnnnnnnnnnnnnnnnnnnnnnnnnnnnnnnnnnnnnnnnnnnnnnnnnnnnnnnnnnnnnnnnnnnnnnnnnnnnnnnnnnnnnnnnnnnnnnnnnnnnnnnnnnnnnnnnnnnnnnnnnnnnnnnnnnnnnnnnnnnnnnnnnnnnnnnnnnnnnnnnnnnnnnnnnnnnnnnnnnnnnnnnnnnnnnnnnnnnnnnnnnnnnnnnnnnnnnnnnnnnnnnnnnnnnnnnnnnnnnnnnnnnnnnnnnnnnnnnnnnnnnnnnnnnnnnnnnnnnnnnnnnnnnnnnnnnnnnnnnnnnnnnnnnnnnnnnnnnnnnnnnnnnnnnnnnnnnnnnnnnnnnnnnnnnnnnnnnnnnnnnnnnnnnnnnnnnnnnnnnnnnnnnnnnnnnnnnnnnnnnnnnnnnnnnnnnnnnnnnnnnnnnnnnnnnnnnnnnnnnnnnnnnnnnnnnnnnnnnnnnnnnnnnnnnnnnnnnnnnnnnnnnnnnnnnnnnnnnnnnnnnnnnnnnnnnnnnnnnnnnnnnnnnnnnnnnnnnnnnnnnnnnnnnnnnnnnnnnnnnnnnnnnnnnnnnnnnnnnnnnnnnnnnnnnnnnnnnnnnnnnnnnnnnnnnnnnnnnnnnnnnnnnnnnnnnnnnnnnnnnnnnnnnnnnnnnnnnnnnnnnnnnnnnnnnnnnnnnnnnnnnnnnnnnnnnnnnnnnnnnnnnnnnnnnnnnnnnnnnnnnnnnnnnnnnnnnnnnnnnnnnnnnnnnnnnnnnnnnnnnnnnnnnnnnnnnnnnnnnnnnnnnnnnnnnnnnnnnnnnnnnnnnnnnnnnnnnnnnnnnnnnnnnnnnnnnnnnnnnnnnnnnnnnnnnnnnnnnnnnnnnnnnnnnnnnnnnnnnnnnnnnnnnnnnnnnnnnnnnnnnnnnnnnnnnnnnnnnnnnnnnnnnnnnnnnnnnnnnnnnnnnnnnnnnnnnnnnnnnnnnnnnnnnnnnnnnnnnnnnnnnnnnnnnnnnnnnnnnnnnnnnnnnnnnnnnnnnnnnnnnnnnnnnnnnnnnnnnnnnnnnnnnnnnnnnnnnnnnnnnnnnnnnnnnnnnnnnnnnnnnnnnnnnnnnnnnnnnnnnnnnnnnnnnnnnnnnnnnnnnnnnnnnnnnnnnnnnnnnnnnnnnnnnnnnnnnnnnnnnnnnnnnnnnnnnnnnnnnnnnnnnnnnnnnnnnnnnnnnnnnnnnnnnnnnnnnnnnnnnnnnnnnnnnnnnnnnnnnnnnnnnnnnnnnnnnnnnnnnnnnnnnnnnnnnnnnnnnnnnnnnnnnnnnnnnnnnnnnnnnnnnnnnnnnnnnnnnnnnnnnnnnnnnnnnnnnnnnnnnnnnnnnnnnnnnnnnnnnnnnnnnnnnnnnnnnnnnnnnnnnnnnnnnnnnnnnnnnnnnnnnnnnnnnnnnnnnnnnnnnnnnnnnnnnnnnnnnnnnnnnnnnnnnnnnnnnnnnnnnnnnnnnnnnnnnnnnnnnnnnnnnnnnnnnnnnnnnnnnnnnnnnnnnnnnnnnnnnnnnnnnnnnnnnnnnnnnnnnnnnnnnnnnnnnnnnnnnnnnnnnnnnnnnnnnnnnnnnnnnnnnnnnnnnnnnnnnnnnnnnnnnnnnnnnnnnnnnnnnnnnnnnnnnnnnnnnnnnnnnnnnnnnnnnnnnnnnnnnnnnnnnnnnnnnnnnnnnnnnnnnnnnnnnnnnnnnnnnnnnnnnnnnnnnnnnnnnnnnnnnnnnnnnnnnnnnnnnnnnnnnnnnnnnnnnnnnnnnnnnnnnnnnnnnnnnnnnnnnnnnnnnnnnnnnnnnnnnnnnnnnnnnnnnnnnnnnnnnnnnnnnnnnnnnnnnnnnnnnnnnnnnnnnnnnnnnnnnnnnnnnnnnnnnnnnnnnnnnnnnnnnnnnnnnnnnnnnnnnnnnnnnnnnnnnnnnnnnnnnnnnnnnnnnnnnnnnnnnnnnnnnnnnnnnnnnnnnnnnnnnnnnnnnnnnnnnnnnnnnnnnnnnnnnnnnnnnnnnnnnnnnnnnnnnnnnnnnnnnnnnnnnnnnnnnnnnnnnnnnnnnnnnnnnnnnnnnnnnnnnnnnnnnnnnnnnnnnnnnnnnnnnnnnnnnnnnnnnnnnnnnnnnnnnnnnnnnnnnnnnnnnnnnnnnnnnnnnnnnnnnnnnnnnnnnnnnnnnnnnnnnnnnnnnnnnnnnnnnnnnnnnnnnnnnnnnnnnnnnnnnnnnnnnnnnnnnnnnnnnnnnnnnnnnnnnnnnnnnnnnnnnnnnnnnnnnnnnnnnnnnnnnnnnnnnnnnnnnnnnnnnnnnnnnnnnnnnnnnnnnnnnnnnnnnnnnnnnnnnnnnnnnnnnnnnnnnnnnnnnnnnnnnnnnnnnnnnnnnnnnnnnnnnnnnnnnnnnnnnnnnnnnnnnnnnnnnnnnnnnnnnnnnnnnnnnnnnnnnnnnnnnnnnnnnnnnnnnnnnnnnnnnnnnnnnnnnnnnnnnnnnnnnnnnnnnnnnnnnnnnnnnnnnnnnnnnnnnnnnnnnnnnnnnnnnnnnnnnnnnnnnnnnnnnnnnnnnnnnnnnnnnnnnnnnnnnnnnnnnnnnnnnnnnnnnnnnnnnnnnnnnnnnnnnnnnnnnnnnnnnnnnnnnnnnnnnnnnnnnnnnnnnnnnnnnnnnnnnnnnnnnnnnnnnnnnnnnnnnnnnnnnnnnnnnnnnnnnnnnnnnnnnnnnnnnnnnnnnnnnnnnnnnnnnnnnnnnnnnnnnnnnnnnnnnnnnnnnnnnnnnnnnnnnnnnnnnnnnnnnnnnnnnnnnnnnnnnnnnnnnnnnnnnnnnnnnnnnnnnnnnnnnnnnnnnnnnnnnnnnnnnnnnnnnnnnnnnnnnnnnnnnnnnnnnnnnnnnnnnnnnnnnnnnnnnnnnnnnnnnnnnnnnnnnnnnnnnnnnnnnnnnnnnnnnnnnnnnnnnnnnnnnnnnnnnnnnnnnnnnnnnnnnnnnnnnnnnnnnnnnnnnnnnnnnnnnnnnnnnnnnnnnnnnnnnnnnnnnnnnnnnnnnnnnnnnnnnnnnnnnnnnnnnnnnnnnnnnnnnnnnnnnnnnnnnnnnnnnnnnnnnnnnnnnnnnnnnnnnnnnnnnnnnnnnnnnnnnnnnnnnnnnnnnnnnnnnnnnnnnnnnnnnnnnnnnnnnnnnnnnnnnnnnnnnnnnnnnnnnnnnnnnnnnnnnnnnnnnnnnnnnnnnnnnnnnnnnnnnnnnnnnnnnnnnnnnnnnnnnnnnnnnnnnnnnnnnnnnnnnnnnnnnnnnnnnnnnnnnnnnnnnnnnnnnnnnnnnnnnnnnnnnnnnnnnnnnnnnnnnnnnnnnnnnnnnnnnnnnnnnnnnnnnnnnnnnnnnnnnnnnnnnnnnnnnnnnnnnnnnnnnnnnnnnnnnnnnnnnnnnnnnnnnnnnnnnnnnnnnnnnnnnnnnnnnnnnnnnnnnnnnnnnnnnnnnnnnnnnnnnnnnnnnnnnnnnnnnnnnnnnnnnnnnnnnnnnnnnnnnnnnnnnnnnnnnnnnnnnnnnnnnnnnnnnnnnnnnnnnnnnnnnnnnnnnnnnnnnnnnnnnnnnnnnnnnnnnnnnnnnnnnnnnnnnnnnnnnnnnnnnnnnnnnnnnnnnnnnnnnnnnnnnnnnnnnnnnnnnnnnnnnnnnnnnnnnnnnnnnnnnnnnnnnnnnnnnnnnnnnnnnnnnnnnnnnnnnnnnnnnnnnnnnnnnnnnnnnnnnnnnnnnnnnnnnnnnnnnnnnnnnnnnnnnnnnnnnnnnnnnnnnnnnnnnnnnnnnnnnnnnnnnnnnnnnnnnnnnnnnnnnnnnnnnnnnnnnnnnnnnnnnnnnnnnnnnnnnnnnnnnnnnnnnnnnnnnnnnnnnnnnnnnnnnnnnnnnnnnnnnnnnnnnnnnnnnnnnnnnnnnnnnnnnnnnnnnnnnnnnnnnnnnnnnnnnnnnnnnnnnnnnnnnnnnnnnnnnnnnnnnnnnnnnnnnnnnnnnnnnnnnnnnnnnnnnnnnnnnnnnnnnnnnnnnnnnnnnnnnnnnnnnnnnnnnnnnnnnnnnnnnnnnnnnnnnnnnnnnnnnnnnnnnnnnnnnnnnnnnnnnnnnnnnnnnnnnnnnnnnnnnnnnnnnnnnnnnnnnnnnnnnnnnnnnnnnnnnnnnnnnnnnnnnnnnnnnnnnnnnnnnnnnnnnnnnnnnnnnnnnnnnnnnnnnnnnnnnnnnnnnnnnnnnnnnnnnnnnnnnnnnnnnnnnnnnnnnnnnnnnnnnnnnnnnnnnnnnnnnnnnnnnnnnnnnnnnnnnnnnnnnnnnnnnnnnnnnnnnnnnnnnnnnnnnnnnnnnnnnnnnnnnnnnnnnnnnnnnnnnnnnnnnnnnnnnnnnnnnnnnnnnnnnnnnnnnnnnnnnnnnnnnnnnnnnnnnnnnnnnnnnnnnnnnnnnnnnnnnnnnnnnnnnnnnnnnnnnnnnnnnnnnnnnnnnnnnnnnnnnnnnnnnnnnnnnnnnnnnnnnnnnnnnnnnnnnnnnnnnnnnnnnnnnnnnnnnnnnnnnnnnnnnnnnnnnnnnnnnnnnnnnnnnnnnnnnnnnnnnnnnnnnnnnnnnnnnnnnnnnnnnnnnnnnnnnnnnnnnnnnnnnnnnnnnnnnnnnnnnnnnnnnnnnnnnnnnnnnnnnnnnnnnnnnnnnnnnnnnnnnnnnnnnnnnnnnnnnnnnnnnnnnnnnnnnnnnnnnnnnnnnnnnnnnnnnnnnnnnnnnnnnnnnnnnnnnnnnnnnnnnnnnnnnnnnnnnnnnnnnnnnnnnnnnnnnnnnnnnnnnnnnnnnnnnnnnnnnnnnnnnnnnnnnnnnnnnnnnnnnnnnnnnnnnnnnnnnnnnnnnnnnnnnnnnnnnnnnnnnnnnnnnnnnnnnnnnnnnnnnnnnnnnnnnnnnnnnnnnnnnnnnnnnnnnnnnnnnnnnnnnnnnnnnnnnnnnnnnnnnnnnnnnnnnnnnnnnnnnnnnnnnnnnnnnnnnnnnnnnnnnnnnnnnnnnnnnnnnnnnnnnnnnnnnnnnnnnnnnnnnnnnnnnnnnnnnnnnnnnnnnnnnnnnnnnnnnnnnnnnnnnnnnnnnnnnnnnnnnnnnnnnnnnnnnnnnnnnnnnnnnnnnnnnnnnnnnnnnnnnnnnnnnnnnnnnnnnnnnnnnnnnnnnnnnnnnnnnnnnnnnnnnnnnnnnnnnnnnnnnnnnnnnnnnnnnnnnnnnnnnnnnnnnnnnnnnnnnnnnnnnnnnnnnnnnnnnnnnnnnnnnnnnnnnnnnnnnnnnnnnnnnnnnnnnnnnnnnnnnnnnnnnnnnnnnnnnnnnnnnnnnnnnnnnnnnnnnnnnnnnnnnnnnnnnnnnnnnnnnnnnnnnnnnnnnnnnnnnnnnnnnnnnnnnnnnnnnnnnnnnnnnnnnnnnnnnnnnnnnnnnnnnnnnnnnnnnnnnnnnnnnnnnnnnnnnnnnnnnnnnnnnnnnnnnnnnnnnnnnnnnnnnnnnnnnnnnnnnnnnnnnnnnnnnnnnnnnnnnnnnnnnnnnnnnnnnnnnnnnnnnnnnnnnnnnnnnnnnnnnnnnnnnnnnnnnnnnnnnnnnnnnnnnnnnnnnnnnnnnnnnnnnnnnnnnnnnnnnnnnnnnnnnnnnnnnnnnnnnnnnnnnnnnnnnnnnnnnnnnnnnnnnnnnnnnnnnnnnnnnnnnnnnnnnnnnnnnnnnnnnnnnnnnnnnnnnnnnnnnnnnnnnnnnnnnnnnnnnnnnnnnnnnnnnnnnnnnnnnnnnnnnnnnnnnnnnnnnnnnnnnnnnnnnnnnnnnnnnnnnnnnnnnnnnnnnnnnnnnnnnnnnnnnnnnnnnnnnnnnnnnnnnnnnnnnnnnnnnnnnnnnnnnnnnnnnnnnnnnnnnnnnnnnnnnnnnnnnnnnnnnnnnnnnnnnnnnnnnnnnnnnnnnnnnnnnnnnnnnnnnnnnnnnnnnnnnnnnnnnnnnnnnnnnnnnnnnnnnnnnnnnnnnnnnnnnnnnnnnnnnnnnnnnnnnnnnnnnnnnnnnnnnnnnnnnnnnnnnnnnnnnnnnnnnnnnnnnnnnnnnnnnnnnnnnnnnnnnnnnnnnnnnnnnnnnnnnnnnnnnnnnnnnnnnnnnnnnnnnnnnnnnnnnnnnnnnnnnnnnnnnnnnnnnnnnnnnnnnnnnnnnnnnnnnnnnnnnnnnnnnnnnnnnnnnnnnnnnnnnnnnnnnnnnnnnnnnnnnnnnnnnnnnnnnnnnnnnnnnnnnnnnnnnnnnnnnnnnnnnnnnnnnnnnnnnnnnnnnnnnnnnnnnnnnnnnnnnnnnnnnnnnnnnnnnnnnnnnnnnnnnnnnnnnnnnnnnnnnnnnnnnnnnnnnnnnnnnnnnnnnnnnnnnnnnnnnnnnnnnnnnnnnnnnnnnnnnnnnnnnnnnnnnnnnnnnnnnnnnnnnnnnnnnnnnnnnnnnnnnnnnnnnnnnnnnnnnnnnnnnnnnnnnnnnnnnnnnnnnnnnnnnnnnnnnnnnnnnnnnnnnnnnnnnnnnnnnnnnnnnnnnnnnnnnnnnnnnnnnnnnnnnnnnnnnnnnnnnnnnnnnnnnnnnnnnnnnnnnnnnnnnnnnnnnnnnnnnnnnnnnnnnnnnnnnnnnnnnnnnnnnnnnnnnnnnnnnnnnnnnnnnnnnnnnnnnnnnnnnnnnnnnnnnnnnnnnnnnnnnnnnnnnnnnnnnnnnnnnnnnnnnnnnnnnnnnnnnnnnnnnnnnnnnnnnnnnnnnnnnnnnnnnnnnnnnnnnnnnnnnnnnnnnnnnnnnnnnnnnnnnnnnnnnnnnnnnnnnnnnnnnnnnnnnnnnnnnnnnnnnnnnnnnnnnnnnnnnnnnnnnnnnnnnnnnnnnnnnnnnnnnnnnnnnnnnnnnnnnnnnnnnnnnnnnnnnnnnnnnnnnnnnnnnnnnnnnnnnnnnnnnnnnnnnnnnnnnnnnnnnnnnnnnnnnnnnnnnnnnnnnnnnnnnnnnnnnnnnnnnnnnnnnnnnnnnnnnnnnnnnnnnnnnnnnnnnnnnnnnnnnnnnnnnnnnnnnnnnnnnnnnnnnnnnnnnnnnnnnnnnnnnnnnnnnnnnnnnnnnnnnnnnnnnnnnnnnnnnnnnnnnnnnnnnnnnnnnnnnnnnnnnnnnnnnnnnnnnnnnnnnnnnnnnnnnnnnnnnnnnnnnnnnnnnnnnnnnnnnnnnnnnnnnnnnnnnnnnnnnnnnnnnnnnnnnnnnnnnnnnnnnnnnnnnnnnnnnnnnnnnnnnnnnnnnnnnnnnnnnnnnnnnnnnnnnnnnnnnnnnnnnnnnnnnnnnnnnnnnnnnnnnnnnnnnnnnnnnnnnnnnnnnnnnnnnnnnnnnnnnnnnnnnnnnnnnnnnnnnnnnnnnnnnnnnnnnnnnnnnnnnnnnnnnnnnnnnnnnnnnnnnnnnnnnnnnnnnnnnnnnnnnnnnnnnnnnnnnnnnnnnnnnnnnnnnnnnnnnnnnnnnnnnnnnnnnnnnnnnnnnnnnnnnnnnnnnnnnnnnnnnnnnnnnnnnnnnnnnnnnnnnnnnnnnnnnnnnnnnnnnnnnnnnnnnnnnnnnnnnnnnnnnnnnnnnnnnnnnnnnnnnnnnnnnnnnnnnnnnnnnnnnnnnnnnnnnnnnnnnnnnnnnnnnnnnnnnnnnnnnnnnnnnnnnnnnnnnnnnnnnnnnnnnnnnnnnnnnnnnnnnnnnnnnnnnnnnnnnnnnnnnnnnnnnnnnnnnnnnnnnnnnnnnnnnnnnnnnnnnnnnnnnnnnnnnnnnnnnnnnnnnnnnnnnnnnnnnnnnnnnnnnnnnnnnnnnnnnnnnnnnnnnnnnnnnnnnnnnnnnnnnnnnnnnnnnnnnnnnnnnnnnnnnnnnnnnnnnnnnnnnnnnnnnnnnnnnnnnnnnnnnnnnnnnnnnnnnnnnnnnnnnnnnnnnnnnnnnnnnnnnnnnnnnnnnnnnnnnnnnnnnnnnnnnnnnnnnnnnnnnnnnnnnnnnnnnnnnnnnnnnnnnnnnnnnnnnnnnnnnnnnnnnnnnnnnnnnnnnnnnnnnnnnnnnnnnnnnnnnnnnnnnnnnnnnnnnnnnnnnnnnnnnnnnnnnnnnnnnnnnnnnnnnnnnnnnnnnnnnnnnnnnnnnnnnnnnnnnnnnnnnnnnnnnnnnnnnnnnnnnnnnnnnnnnnnnnnnnnnnnnnnnnnnnnnnnnnnnnnnnnnnnnnnnnnnnnnnnnnnnnnnnnnnnnnnnnnnnnnnnnnnnnnnnnnnnnnnnnnnnnnnnnnnnnnnnnnnnnnnnnnnnnnnnnnnnnnnnnnnnnnnnnnnnnnnnnnnnnnnnnnnnnnnnnnnnnnnnnnnnnnnnnnnnnnnnnnnnnnnnnnnnnnnnnnnnnnnnnnnnnnnnnnnnnnnnnnnnnnnnnnnnnnnnnnnnnnnnnnnnnnnnnnnnnnnnnnnnnnnnnnnnnnnnnnnnnnnnnnnnnnnnnnnnnnnnnnnnnnnnnnnnnnnnnnnnnnnnnnnnnnnnnnnnnnnnnnnnnnnnnnnnnnnnnnnnnnnnnnnnnnnnnnnnnnnnnnnnnnnnnnnnnnnnnnnnnnnnnnnnnnnnnnnnnnnnnnnnnnnnnnnnnnnnnnnnnnnnnnnnnnnnnnnnnnnnnnnnnnnnnnnnnnnnnnnnnnnnnnnnnnnnnnnnnnnnnnnnnnnnnnnnnnnnnnnnnnnnnnnnnnnnnnnnnnnnnnnnnnnnnnnnnnnnnnnnnnnnnnnnnnnnnnnnnnnnnnnnnnnnnnnnnnnnnnnnnnnnnnnnnnnnnnnnnnnnnnnnnnnnnnnnnnnnnnnnnnnnnnnnnnnnnnnnnnnnnnnnnnnnnnnnnnnnnnnnnnnnnnnnnnnnnnnnnnnnnnnnnnnnnnnnnnnnnnnnnnnnnnnnnnnnnnnnnnnnnnnnnnnnnnnnnnnnnnnnnnnnnnnnnnnnnnnnnnnnnnnnnnnnnnnnnnnnnnnnnnnnnnnnnnnnnnnnnnnnnnnnnnnnnnnnnnnnnnnnnnnnnnnnnnnnnnnnnnnnnnnnnnnnnnnnnnnnnnnnnnnnnnnnnnnnnnnnnnnnnnnnnnnnnnnnnnnnnnnnnnnnnnnnnnnnnnnnnnnnnnnnnnnnnnnnnnnnnnnnnnnnnnnnnnnnnnnnnnnnnnnnnnnnnnnnnnnnnnnnnnnnnnnnnnnnnnnnnnnnnnnnnnnnnnnnnnnnnnnnnnnnnnnnnnnnnnnnnnnnnnnnnnnnnnnnnnnnnnnnnnnnnnnnnnnnnnnnnnnnnnnnnnnnnnnnnnnnnnnnnnnnnnnnnnnnnnnnnnnnnnnnnnnnnnnnnnnnnnnnnnnnnnnnnnnnnnnnnnnnnnnnnnnnnnnnnnnnnnnnnnnnnnnnnnnnnnnnnnnnnnnnnnnnnnnnnnnnnnnnnnnnnnnnnnnnnnnnnnnnnnnnnnnnnnnnnnnnnnnnnnnnnnnnnnnnnnnnnnnnnnnnnnnnnnnnnnnnnnnnnnnnnnnnnnnnnnnnnnnnnnnnnnnnnnnnnnnnnnnnnnnnnnnnnnnnnnnnnnnnnnnnnnnnnnnnnnnnnnnnnnnnnnnnnnnnnnnnnnnnnnnnnnnnnnnnnnnnnnnnnnnnnnnnnnnnnnnnnnnnnnnnnnnnnnnnnnnnnnnnnnnnnnnnnnnnnnnnnnnnnnnnnnnnnnnnnnnnnnnnnnnnnnnnnnnnnnnnnnnnnnnnnnnnnnnnnnnnnnnnnnnnnnnnnnnnnnnnnnnnnnnnnnnnnnnnnnnnnnnnnnnnnnnnnnnnnnnnnnnnnnnnnnnnnnnnnnnnnnnnnnnnnnnnnnnnnnnnnnnnnnnnnnnnnnnnnnnnnnnnnnnnnnnnnnnnnnnnnnnnnnnnnnnnnnnnnnnnnnnnnnnnnnnnnnnnnnnnnnnnnnnnnnnnnnnnnnnnnnnnnnnnnnnnnnnnnnnnnnnnnnnnnnnnnnnnnnnnnnnnnnnnnnnnnnnnnnnnnnnnnnnnnnnnnnnnnnnnnnnnnnnnnnnnnnnnnnnnnnnnnnnnnnnnnnnnnnnnnnnnnnnnnnnnnnnnnnnnnnnnnnnnnnnnnnnnnnnnnnnnnnnnnnnnnnnnnnnnnnnnnnnnnnnnnnnnnnnnnnnnnnnnnnnnnnnnnnnnnnnnnnnnnnnnnnnnnnnnnnnnnnnnnnnnnnnnnnnnnnnnnnnnnnnnnnnnnnnnnnnnnnnnnnnnnnnnnnnnnnnnnnnnnnnnnnnnnnnnnnnnnnnnnnnnnnnnnnnnnnnnnnnnnnnnnnnnnnnnnnnnnnnnnnnnnnnnnnnnnnnnnnnnnnnnnnnnnnnnnnnnnnnnnnnnnnnnnnnnnnnnnnnnnnnnnnnnnnnnnnnnnnnnnnnnnnnnnnnnnnnnnnnnnnnnnnnnnnnnnnnnnnnnnnnnnnnnnnnnnnnnnnnnnnnnnnnnnnnnnnnnnnnnnnnnnnnnnnnnnnnnnnnnnnnnnnnnnnnnnnnnnnnnnnnnnnnnnnnnnnnnnnnnnnnnnnnnnnnnnnnnnnnnnnnnnnnnnnnnnnnnnnnnnnnnnnnnnnnnnnnnnnnnnnnnnnnnnnnnnnnnnnnnnnnnnnnnnnnnnnnnnnnnnnnnnnnnnnnnnnnnnnnnnnnnnnnnnnnnnnnnnnnnnnnnnnnnnnnnnnnnnnnnnnnnnnnnnnnnnnnnnnnnnnnnnnnnnnnnnnnnnnnnnnnnnnnnnnnnnnnnnnnnnnnnnnnnnnnnnnnnnnnnnnnnnnnnnnnnnnnnnnnnnnnnnnnnnnnnnnnnnnnnnnnnnnnnnnnnnnnnnnnnnnnnnnnnnnnnnnnnnnnnnnnnnnnnnnnnnnnnnnnnnnnnnnnnnnnnnnnnnnnnnnnnnnnnnnnnnnnnnnnnnnnnnnnnnnnnnnnnnnnnnnnnnnnnnnnnnnnnnnnnnnnnnnnnnnnnnnnnnnnnnnnnnnnnnnnnnnnnnnnnnnnnnnnnnnnnnnnnnnnnnnnnnnnnnnnnnnnnnnnnnnnnnnnnnnnnnnnnnnnnnnnnnnnnnnnnnnnnnnnnnnnnnnnnnnnnnnnnnnnnnnnnnnnnnnnnnnnnnnnnnnnnnnnnnnnnnnnnnnnnnnnnnnnnnnnnnnnnnnnnnnnnnnnnnnnnnnnnnnnnnnnnnnnnnnnnnnnnnnnnnnnnnnnnnnnnnnnnnnnnnnnnnnnnnnnnnnnnnnnnnnnnnnnnnnnnnnnnnnnnnnnnnnnnnnnnnnnnnnnnnnnnnnnnnnnnnnnnnnnnnnnnnnnnnnnnnnnnnnnnnnnnnnnnnnnnnnnnnnnnnnnnnnnnnnnnnnnnnnnnnnnnnnnnnnnnnnnnnnnnnnnnnnnnnnnnnnnnnnnnnnnnnnnnnnnnnnnnnnnnnnnnnnnnnnnnnnnnnnnnnnnnnnnnnnnnnnnnnnnnnnnnnnnnnnnnnnnnnnnnnnnnnnnnnnnnnnnnnnnnnnnnnnnnnnnnnnnnnnnnnnnnnnnnnnnnnnnnnnnnnnnnnnnnnnnnnnnnnnnnnnnnnnnnnnnnnnnnnnnnnnnnnnnnnnnnnnnnnnnnnnnnnnnnnnnnnnnnnnnnnnnnnnnnnnnnnnnnnnnnnnnnnnnnnnnnnnnnnnnnnnnnnnnnnnnnnnnnnnnnnnnnnnnnnnnnnnnnnnnnnnnnnnnnnnnnnnnnnnnnnnnnnnnnnnnnnnnnnnnnnnnnnnnnnnnnnnnnnnnnnnnnnnnnnnnnnnnnnnnnnnnnnnnnnnnnnnnnnnnnnnnnnnnnnnnnnnnnnnnnnnnnnnnnnnnnnnnnnnnnnnnnnnnnnnnnnnnnnnnnnnnnnnnnnnnnnnnnnnnnnnnnnnnnnnnnnnnnnnnnnnnnnnnnnnnnnnnnnnnnnnnnnnnnnnnnnnnnnnnnnnnnnnnnnnnnnnnnnnnnnnnnnnnnnnnnnnnnnnnnnnnnnnnnnnnnnnnnnnnnnnnnnnnnnnnnnnnnnnnnnnnnnnnnnnnnnnnnnnnnnnnnnnnnnnnnnnnnnnnnnnnnnnnnnnnnnnnnnnnnnnnnnnnnnnnnnnnnnnnnnnnnnnnnnnnnnnnnnnnnnnnnnnnnnnnnnnnnnnnnnnnnnnnnnnnnnnnnnnnnnnnnnnnnnnnnnnnnnnnnnnnnnnnnnnnnnnnnnnnnnnnnnnnnnnnnnnnnnnnnnnnnnnnnnnnnnnnnnnnnnnnnnnnnnnnnnnnnnnnnnnnnnnnnnnnnnnnnnnnnnnnnnnnnnnnnnnnnnnnnnnnnnnnnnnnnnnnnnnnnnnnnnnnnnnnnnnnnnnnnnnnnnnnnnnnnnnnnnnnnnnnnnnnnnnnnnnnnnnnnnnnnnnnnnnnnnnnnnnnnnnnnnnnnnnnnnnnnnnnnnnnnnnnnnnnnnnnnnnnnnnnnnnnnnnnnnnnnnnnnnnnnnnnnnnnnnnnnnnnnnnnnnnnnnnnnnnnnnnnnnnnnnnnnnnnnnnnnnnnnnnnnnnnnnnnnnnnnnnnnnnnnnnnnnnnnnnnnnnnnnnnnnnnnnnnnnnnnnnnnnnnnnnnnnnnnnnnnnnnnnnnnnnnnnnnnnnnnnnnnnnnnnnnnnnnnnnnnnnnnnnnnnnnnnnnnnnnnnnnnnnnnnnnnnnnnnnnnnnnnnnnnnnnnnnnnnnnnnnnnnnnnnnnnnnnnnnnnnnnnnnnnnnnnnnnnnnnnnnnnnnnnnnnnnnnnnnnnnnnnnnnnnnnnnnnnnnnnnnnnnnnnnnnnnnnnnnnnnnnnnnnnnnnnnnnnnnnnnnnnnnnnnnnnnnnnnnnnnnnnnnnnnnnnnnnnnnnnnnnnnnnnnnnnnnnnnnnnnnnnnnnnnnnnnnnnnnnnnnnnnnnnnnnnnnnnnnnnnnnnnnnnnnnnnnnnnnnnnnnnnnnnnnnnnnnnnnnnnnnnnnnnnnnnnnnnnnnnnnnnnnnnnnnnnnnnnnnnnnnnnnnnnnnnnnnnnnnnnnnnnnnnnnnnnnnnnnnnnnnnnnnnnnnnnnnnnnnnnnnnnnnnnnnnnnnnnnnnnnnnnnnnnnnnnnnnnnnnnnnnnnnnnnnnnnnnnnnnnnnnnnnnnnnnnnnnnnnnnnnnnnnnnnnnnnnnnnnnnnnnnnnnnnnnnnnnnnnnnnnnnnnnnnnnnnnnnnnnnnnnnnnnnnnnnnnnnnnnnnnnnnnnnnnnnnnnnnnnnnnnnnnnnnnnnnnnnnnnnnnnnnnnnnnnnnnnnnnnnnnnnnnnnnnnnnnnnnnnnnnnnnnnnnnnnnnnnnnnnnnnnnnnnnnnnnnnnnnnnnnnnnnnnnnnnnnnnnnnnnnnnnnnnnnnnnnnnnnnnnnnnnnnnnnnnnnnnnnnnnnnnnnnnnnnnnnnnnnnnnnnnnnnnnnnnnnnnnnnnnnnnnnnnnnnnnnnnnnnnnnnnnnnnnnnnnnnnnnnnnnnnnnnnnnnnnnnnnnnnnnnnnnnnnnnnnnnnnnnnnnnnnnnnnnnnnnnnnnnnnnnnnnnnnnnnnnnnnnnnnnnnnnnnnnnnnnnnnnnnnnnnnnnnnnnnnnnnnnnnnnnnnnnnnnnnnnnnnnnnnnnnnnnnnnnnnnnnnnnnnnnnnnnnnnnnnnnnnnnnnnnnnnnnnnnnnnnnnnnnnnnnnnnnnnnnnnnnnnnnnnnnnnnnnnnnnnnnnnnnnnnnnnnnnnnnnnnnnnnnnnnnnnnnnnnnnnnnnnnnnnnnnnnnnnnnnnnnnnnnnnnnnnnnnnnnnnnnnnnnnnnnnnnnnnnnnnnnnnnnnnnnnnnnnnnnnnnnnnnnnnnnnnnnnnnnnnnnnnnnnnnnnnnnnnnnnnnnnnnnnnnnnnnnnnnnnnnnnnnnnnnnnnnnnnnnnnnnnnnnnnnnnnnnnnnnnnnnnnnnnnnnnnnnnnnnnnnnnnnnnnnnnnnnnnnnnnnnnnnnnnnnnnnnnnnnnnnnnnnnnnnnnnnnnnnnnnnnnnnnnnnnnnnnnnnnnnnnnnnnnnnnnnnnnnnnnnnnnnnnnnnnnnnnnnnnnnnnnnnnnnnnnnnnnnnnnnnnnnnnnnnnnnnnnnnnnnnnnnnnnnnnnnnnnnnnnnnnnnnnnnnnnnnnnnnnnnnnnnnnnnnnnnnnnnnnnnnnnnnnnnnnnnnnnnnnnnnnnnnnnnnnnnnnnnnnnnnnnnnnnnnnnnnnnnnnnnnnnnnnnnnnnnnnnnnnnnnnnnnnnnnnnnnnnnnnnnnnnnnnnnnnnnnnnnnnnnnnnnnnnnnnnnnnnnnnnnnnnnnnnnnnnnnnnnnnnnnnnnnnnnnnnnnnnnnnnnnnnnnnnnnnnnnnnnnnnnnnnnnnnnnnnnnnnnnnnnnnnnnnnnnnnnnnnnnnnnnnnnnnnnnnnnnnnnnnnnnnnnnnnnnnnnnnnnnnnnnnnnnnnnnnnnnnnnnnnnnnnnnnnnnnnnnnnnnnnnnnnnnnnnnnnnnnnnnnnnnnnnnnnnnnnnnnnnnnnnnnnnnnnnnnnnnnnnnnnnnnnnnnnnnnnnnnnnnnnnnnnnnnnnnnnnnnnnnnnnnnnnnnnnnnnnnnnnnnnnnnnnnnnnnnnnnnnnnnnnnnnnnnnnnnnnnnnnnnnnnnnnnnnnnnnnnnnnnnnnnnnnnnnnnnnnnnnnnnnnnnnnnnnnnnnnnnnnnnnnnnnnnnnnnnnnnnnnnnnnnnnnnnnnnnnnnnnnnnnnnnnnnnnnnnnnnnnnnnnnnnnnnnnnnnnnnnnnnnnnnnnnnnnnnnnnnnnnnnnnnnnnnnnnnnnnnnnnnnnnnnnnnnnnnnnnnnnnnnnnnnnnnnnnnnnnnnnnnnnnnnnnnnnnnnnnnnnnnnnnnnnnnnnnnnnnnnnnnnnnnnnnnnnnnnnnnnnnnnnnnnnnnnnnnnnnnnnnnnnnnnnnnnnnnnnnnnnnnnnnnnnnnnnnnnnnnnnnnnnnnnnnnnnnnnnnnnnnnnnnnnnnnnnnnnnnnnnnnnnnnnnnnnnnnnnnnnnnnnnnnnnnnnnnnnnnnnnnnnnnnnnnnnnnnnnnnnnnnnnnnnnnnnnnnnnnnnnnnnnnnnnnnnnnnnnnnnnnnnnnnnnnnnnnnnnnnnnnnnnnnnnnnnnnnnnnnnnnnnnnnnnnnnnnnnnnnnnnnnnnnnnnnnnnnnnnnnnnnnnnnnnnnnnnnnnnnnnnnnnnnnnnnnnnnnnnnnnnnnnnnnnnnnnnnnnnnnnnnnnnnnnnnnnnnnnnnnnnnnnnnnnnnnnnnnnnnnnnnnnnnnnnnnnnnnnnnnnnnnnnnnnnnnnnnnnnnnnnnnnnnnnnnnnnnnnnnnnnnnnnnnnnnnnnnnnnnnnnnnnnnnnnnnnnnnnnnnnnnnnnnnnnnnnnnnnnnnnnnnnnnnnnnnnnnnnnnnnnnnnnnnnnnnnnnnnnnnnnnnnnnnnnnnnnnnnnnnnnnnnnnnnnnnnnnnnnnnnnnnnnnnnnnnnnnnnnnnnnnnnnnnnnnnnnnnnnnnnnnnnnnnnnnnnnnnnnnnnnnnnnnnnnnnnnnnnnnnnnnnnnnnnnnnnnnnnnnnnnnnnnnnnnnnnnnnnnnnnnnnnnnnnnnnnnnnnnnnnnnnnnnnnnnnnnnnnnnnnnnnnnnnnnnnnnnnnnnnnnnnnnnnnnnnnnnnnnnnnnnnnnnnnnnnnnnnnnnnnnnnnnnnnnnnnnnnnnnnnnnnnnnnnnnnnnnnnnnnnnnnnnnnnnnnnnnnnnnnnnnnnnnnnnnnnnnnnnnnnnnnnnnnnnnnnnnnnnnnnnnnnnnnnnnnnnnnnnnnnnnnnnnnnnnnnnnnnnnnnnnnnnnnnnnnnnnnnnnnnnnnnnnnnnnnnnnnnnnnnnnnnnnnnnnnnnnnnnnnnnnnnnnnnnnnnnnnnnnnnnnnnnnnnnnnnnnnnnnnnnnnnnnnnnnnnnnnnnnnnnnnnnnnnnnnnnnnnnnnnnnnnnnnnnnnnnnnnnnnnnnnnnnnnnnnnnnnnnnnnnnnnnnnnnnnnnnnnnnnnnnnnnnnnnnnnnnnnnnnnnnnnnnnnnnnnnnnnnnnnnnnnnnnnnnnnnnnnnnnnnnnnnnnnnnnnnnnnnnnnnnnnnnnnnnnnnnnnnnnnnnnnnnnnnnnnnnnnnnnnnnnnnnnnnnnnnnnnnnnnnnnnnnnnnnnnnnnnnnnnnnnnnnnnnnnnnnnnnnnnnnnnnnnnnnnnnnnnnnnnnnnnnnnnnnnnnnnnnnnnnnnnnnnnnnnnnnnnnnnnnnnnnnnnnnnnnnnnnnnnnnnnnnnnnnnnnnnnnnnnnnnnnnnnnnnnnnnnnnnnnnnnnnnnnnnnnnnnnnnnnnnnnnnnnnnnnnnnnnnnnnnnnnnnnnnnnnnnnnnnnnnnnnnnnnnnnnnnnnnnnnnnnnnnnnnnnnnnnnnnnnnnnnnnnnnnnnnnnnnnnnnnnnnnnnnnnnnnnnnnnnnnnnnnnnnnnnnnnnnnnnnnnnnnnnnnnnnnnnnnnnnnnnnnnnnnnnnnnnnnnnnnnnnnnnnnnnnnnnnnnnnnnnnnnnnnnnnnnnnnnnnnnnnnnnnnnnnnnnnnnnnnnnnnnnnnnnnnnnnnnnnnnnnnnnnnnnnnnnnnnnnnnnnnnnnnnnnnnnnnnnnnnnnnnnnnnnnnnnnnnnnnnnnnnnnnnnnnnnnnnnnnnnnnnnnnnnnnnnnnnnnnnnnnnnnnnnnnnnnnnnnnnnnnnnnnnnnnnnnnnnnnnnnnnnnnnnnnnnnnnnnnnnnnnnnnnnnnnnnnnnnnnnnnnnnnnnnnnnnnnnnnnnnnnnnnnnnnnnnnnnnnnnnnnnnnnnnnnnnnnnnnnnnnnnnnnnnnnnnnnnnnnnnnnnnnnnnnnnnnnnnnnnnnnnnnnnnnnnnnnnnnnnnnnnnnnnnnnnnnnnnnnnnnnnnnnnnnnnnnnnnnnnnnnnnnnnnnnnnnnnnnnnnnnnnnnnnnnnnnnnnnnnnnnnnnnnnnnnnnnnnnnnnnnnnnnnnnnnnnnnnnnnnnnnnnnnnnnnnnnnnnnnnnnnnnnnnnnnnnnnnnnnnnnnnnnnnnnnnnnnnnnnnnnnnnnnnnnnnnnnnnnnnnnnnnnnnnnnnnnnnnnnnnnnnnnnnnnnnnnnnnnnnnnnnnnnnnnnnnnnnnnnnnnnnnnnnnnnnnnnnnnnnnnnnnnnnnnnnnnnnnnnnnnnnnnnnnnnnnnnnnnnnnnnnnnnnnnnnnnnnnnnnnnnnnnnnnnnnnnnnnnnnnnnnnnnnnnnnnnnnnnnnnnnnnnnnnnnnnnnnnnnnnnnnnnnnnnnnnnnnnnnnnnnnnnnnnnnnnnnnnnnnnnnnnnnnnnnnnnnnnnnnnnnnnnnnnnnnnnnnnnnnnnnnnnnnnnnnnnnnnnnnnnnnnnnnnnnnnnnnnnnnnnnnnnnnnnnnnnnnnnnnnnnnnnnnnnnnnnnnnnnnnnnnnnnnnnnnnnnnnnnnnnnnnnnnnnnnnnnnnnnnnnnnnnnnnnnnnnnnnnnnnnnnnnnnnnnnnnnnnnnnnnnnnnnnnnnnnnnnnnnnnnnnnnnnnnnnnnnnnnnnnnnnnnnnnnnnnnnnnnnnnnnnnnnnnnnnnnnnnnnnnnnnnnnnnnnnnnnnnnnnnnnnnnnnnnnnnnnnnnnnnnnnnnnnnnnnnnnnnnnnnnnnnnnnnnnnnnnnnnnnnnnnnnnnnnnnnnnnnnnnnnnnnnnnnnnnnnnnnnnnnnnnnnnnnnnnnnnnnnnnnnnnnnnnnnnnnnnnnnnnnnnnnnnnnnnnnnnnnnnnnnnnnnnnnnnnnnnnnnnnnnnnnnnnnnnnnnnnnnnnnnnnnnnnnnnnnnnnnnnnnnnnnnnnnnnnnnnnnnnnnnnnnnnnnnnnnnnnnnnnnnnnnnnnnnnnnnnnnnnnnnnnnnnnnnnnnnnnnnnnnnnnnnnnnnnnnnnnnnnnnnnnnnnnnnnnnnnnnnnnnnnnnnnnnnnnnnnnnnnnnnnnnnnnnnnnnnnnnnnnnnnnnnnnnnnnnnnnnnnnnnnnnnnnnnnnnnnnnnnnnnnnnnnnnnnnnnnnnnnnnnnnnnnnnnnnnnnnnnnnnnnnnnnnnnnnnnnnnnnnnnnnnnnnnnnnnnnnnnnnnnnnnnnnnnnnnnnnnnnnnnnnnnnnnnnnnnnnnnnnnnnnnnnnnnnnnnnnnnnnnnnnnnnnnnnnnnnnnnnnnnnnnnnnnnnnnnnnnnnnnnnnnnnnnnnnnnnnnnnnnnnnnnnnnnnnnnnnnnnnnnnnnnnnnnnnnnnnnnnnnnnnnnnnnnnnnnnnnnnnnnnnnnnnnnnnnnnnnnnnnnnnnnnnnnnnnnnnnnnnnnnnnnnnnnnnnnnnnnnnnnnnnnnnnnnnnnnnnnnnnnnnnnnnnnnnnnnnnnnnnnnnnnnnnnnnnnnnnnnnnnnnnnnnnnnnnnnnnnnnnnnnnnnnnnnnnnnnnnnnnnnnnnnnnnnnnnnnnnnnnnnnnnnnnnnnnnnnnnnnnnnnnnnnnnnnnnnnnnnnnnnnnnnnnnnnnnnnnnnnnnnnnnnnnnnnnnnnnnnnnnnnnnnnnnnnnnnnnnnnnnnnnnnnnnnnnnnnnnnnnnnnnnnnnnnnnnnnnnnnnnnnnnnnnnnnnnnnnnnnnnnnnnnnnnnnnnnnnnnnnnnnnnnnnnnnnnnnnnnnnnnnnnnnnnnnnnnnnnnnnnnnnnnnnnnnnnnnnnnnnnnnnnnnnnnnnnnnnnnnnnnnnnnnnnnnnnnnnnnnnnnnnnnnnnnnnnnnnnnnnnnnnnnnnnnnnnnnnnnnnnnnnnnnnnnnnnnnnnnnnnnnnnnnnnnnnnnnnnnnnnnnnnnnnnnnnnnnnnnnnnnnnnnnnnnnnnnnnnnnnnnnnnnnnnnnnnnnnnnnnnnnnnnnnnnnnnnnnnnnnnnnnnnnnnnnnnnnnnnnnnnnnnnnnnnnnnnnnnnnnnnnnnnnnnnnnnnnnnnnnnnnnnnnnnnnnnnnnnnnnnnnnnnnnnnnnnnnnnnnnnnnnnnnnnnnnnnnnnnnnnnnnnnnnnnnnnnnnnnnnnnnnnnnnnnnnnnnnnnnnnnnnnnnnnnnnnnnnnnnnnnnnnnnnnnnnnnnnnnnnnnnnnnnnnnnnnnnnnnnnnnnnnnnnnnnnnnnnnnnnnnnnnnnnnnnnnnnnnnnnnnnnnnnnnnnnnnnnnnnnnnnnnnnnnnnnnnnnnnnnnnnnnnnnnnnnnnnnnnnnnnnnnnnnnnnnnnnnnnnnnnnnnnnnnnnnnnnnnnnnnnnnnnnnnnnnnnnnnnnnnnnnnnnnnnnnnnnnnnnnnnnnnnnnnnnnnnnnnnnnnnnnnnnnnnnnnnnnnnnnnnnnnnnnnnnnnnnnnnnnnnnnnnnnnnnnnnnnnnnnnnnnnnnnnnnnnnnnnnnnnnnnnnnnnnnnnnnnnnnnnnnnnnnnnnnnnnnnnnnnnnnnnnnnnnnnnnnnnnnnnnnnnnnnnnnnnnnnnnnnnnnnnnnnnnnnnnnnnnnnnnnnnnnnnnnnnnnnnnnnnnnnnnnnnnnnnnnnnnnnnnnnnnnnnnnnnnnnnnnnnnnnnnnnnnnnnnnnnnnnnnnnnnnnnnnnnnnnnnnnnnnnnnnnnnnnnnnnnnnnnnnnnnnnnnnnnnnnnnnnnnnnnnnnnnnnnnnnnnnnnnnnnnnnnnnnnnnnnnnnnnnnnnnnnnnnnnnnnnnnnnnnnnnnnnnnnnnnnnnnnnnnnnnnnnnnnnnnnnnnnnnnnnnnnnnnnnnnnnnnnnnnnnnnnnnnnnnnnnnnnnnnnnnnnnnnnnnnnnnnnnnnnnnnnnnnnnnnnnnnnnnnnnnnnnnnnnnnnnnnnnnnnnnnnnnnnnnnnnnnnnnnnnnnnnnnnnnnnnnnnnnnnnnnnnnnnnnnnnnnnnnnnnnnnnnnnnnnnnnnnnnnnnnnnnnnnnnnnnnnnnnnnnnnnnnnnnnnnnnnnnnnnnnnnnnnnnnnnnnnnnnnnnnnnnnnnnnnnnnnnnnnnnnnnnnnnnnnnnnnnnnnnnnnnnnnnnnnnnnnnnnnnnnnnnnnnnnnnnnnnnnnnnnnnnnnnnnnnnnnnnnnnnnnnnnnnnnnnnnnnnnnnnnnnnnnnnnnnnnnnnnnnnnnnnnnnnnnnnnnnnnnnnnnnnnnnnnnnnnnnnnnnnnnnnnnnnnnnnnnnnnnnnnnnnnnnnnnnnnnnnnnnnnnnnnnnnnnnnnnnnnnnnnnnnnnnnnnnnnnnnnnnnnnnnnnnnnnnnnnnnnnnnnnnnnnnnnnnnnnnnnnnnnnnnnnnnnnnnnnnnnnnnnnnnnnnnnnnnnnnnnnnnnnnnnnnnnnnnnnnnnnnnnnnnnnnnnnnnnnnnnnnnnnnnnnnnnnnnnnnnnnnnnnnnnnnnnnnnnnnnnnnnnnnnnnnnnnnnnnnnnnnnnnnnnnnnnnnnnnnnnnnnnnnnnnnnnnnnnnnnnnnnnnnnnnnnnnnnnnnnnnnnnnnnnnnnnnnnnnnnnnnnnnnnnnnnnnnnnnnnnnnnnnnnnnnnnnnnnnnnnnnnnnnnnnnnnnnnnnnnnnnnnnnnnnnnnnnnnnnnnnnnnnnnnnnnnnnnnnnnnnnnnnnnnnnnnnnnnnnnnnnnnnnnnnnnnnnnnnnnnnnnnnnnnnnnnnnnnnnnnnnnnnnnnnnnnnnnnnnnnnnnnnnnnnnnnnnnnnnnnnnnnnnnnnnnnnnnnnnnnnnnnnnnnnnnnnnnnnnnnnnnnnnnnnnnnnnnnnnnnnnnnnnnnnnnnnnnnnnnnnnnnnnnnnnnnnnnnnnnnnnnnnnnnnnnnnnnnnnnnnnnnnnnnnnnnnnnnnnnnnnnnnnnnnnnnnnnnnnnnnnnnnnnnnnnnnnnnnnnnnnnnnnnnnnnnnnnnnnnnnnnnnnnnnnnnnnnnnnnnnnnnnnnnnnnnnnnnnnnnnnnnnnnnnnnnnnnnnnnnnnnnnnnnnnnnnnnnnnnnnnnnnnnnnnnnnnnnnnnnnnnnnnnnnnnnnnnnnnnnnnnnnnnnnnnnnnnnnnnnnnnnnnnnnnnnnnnnnnnnnnnnnnnnnnnnnnnnnnnnnnnnnnnnnnnnnnnnnnnnnnnnnnnnnnnnnnnnnnnnnnnnnnnnnnnnnnnnnnnnnnnnnnnnnnnnnnnnnnnnnnnnnnnnnnnnnnnnnnnnnnnnnnnnnnnnnnnnnnnnnnnnnnnnnnnnnnnnnnnnnnnnnnnnnnnnnnnnnnnnnnnnnnnnnnnnnnnnnnnnnnnnnnnnnnnnnnnnnnnnnnnnnnnnnnnnnnnnnnnnnnnnnnnnnnnnnnnnnnnnnnnnnnnnnnnnnnnnnnnnnnnnnnnnnnnnnnnnnnnnnnnnnnnnnnnnnnnnnnnnnnnnnnnnnnnnnnnnnnnnnnnnnnnnnnnnnnnnnnnnnnnnnnnnnnnnnnnnnnnnnnnnnnnnnnnnnnnnnnnnnnnnnnnnnnnnnnnnnnnnnnnnnnnnnnnnnnnnnnnnnnnnnnnnnnnnnnnnnnnnnnnnnnnnnnnnnnnnnnnnnnnnnnnnnnnnnnnnnnnnnnnnnnnnnnnnnnnnnnnnnnnnnnnnnnnnnnnnnnnnnnnnnnnnnnnnnnnnnnnnnnnnnnnnnnnnnnnnnnnnnnnnnnnnnnnnnnnnnnnnnnnnnnnnnnnnnnnnnnnnnnnnnnnnnnnnnnnnnnnnnnnnnnnnnnnnnnnnnnnnnnnnnnnnnnnnnnnnnnnnnnnnnnnnnnnnnnnnnnnnnnnnnnnnnnnnnnnnnnnnnnnnnnnnnnnnnnnnnnnnnnnnnnnnnnnnnnnnnnnnnnnnnnnnnnnnnnnnnnnnnnnnnnnnnnnnnnnnnnnnnnnnnnnnnnnnnnnnnnnnnnnnnnnnnnnnnnnnnnnnnnnnnnnnnnnnnnnnnnnnnnnnnnnnnnnnnnnnnnnnnnnnnnnnnnnnnnnnnnnnnnnnnnnnnnnnnnnnnnnnnnnnnnnnnnnnnnnnnnnnnnnnnnnnnnnnnnnnnnnnnnnnnnnnnnnnnnnnnnnnnnnnnnnnnnnnnnnnnnnnnnnnnnnnnnnnnnnnnnnnnnnnnnnnnnnnnnnnnnnnnnnnnnnnnnnnnnnnnnnnnnnnnnnnnnnnnnnnnnnnnnnnnnnnnnnnnnnnnnnnnnnnnnnnnnnnnnnnnnnnnnnnnnnnnnnnnnnnnnnnnnnnnnnnnnnnnnnnnnnnnnnnnnnnnnnnnnnnnnnnnnnnnnnnnnnnnnnnnnnnnnnnnnnnnnnnnnnnnnnnnnnnnnnnnnnnnnnnnnnnnnnnnnnnnnnnnnnnnnnnnnnnnnnnnnnnnnnnnnnnnnnnnnnnnnnnnnnnnnnnnnnnnnnnnnnnnnnnnnnnnnnnnnnnnnnnnnnnnnnnnnnnnnnnnnnnnnnnnnnnnnnnnnnnnnnnnnnnnnnnnnnnnnnnnnnnnnnnnnnnnnnnnnnnnnnnnnnnnnnnnnnnnnnnnnnnnnnnnnnnnnnnnnnnnnnnnnnnnnnnnnnnnnnnnnnnnnnnnnnnnnnnnnnnnnnnnnnnnnnnnnnnnnnnnnnnnnnnnnnnnnnnnnnnnnnnnnnnnnnnnnnnnnnnnnnnnnnnnnnnnnnnnnnnnnnnnnnnnnnnnnnnnnnnnnnnnnnnnnnnnnnnnnnnnnnnnnnnnnnnnnnnnnnnnnnnnnnnnnnnnnnnnnnnnnnnnnnnnnnnnnnnnnnnnnnnnnnnnnnnnnnnnnnnnnnnnnnnnnnnnnnnnnnnnnnnnnnnnnnnnnnnnnnnnnnnnnnnnnnnnnnnnnnnnnnnnnnnnnnnnnnnnnnnnnnnnnnnnnnnnnnnnnnnnnnnnnnnnnnnnnnnnnnnnnnnnnnnnnnnnnnnnnnnnnnnnnnnnnnnnnnnnnnnnnnnnnnnnnnnnnnnnnnnnnnnnnnnnnnnnnnnnnnnnnnnnnnnnnnnnnnnnnnnnnnnnnnnnnnnnnnnnnnnnnnnnnnnnnnnnnnnnnnnnnnnnnnnnnnnnnnnnnnnnnnnnnnnnnnnnnnnnnnnnnnnnnnnnnnnnnnnnnnnnnnnnnnnnnnnnnnnnnnnnnnnnnnnnnnnnnnnnnnnnnnnnnnnnnnnnnnnnnnnnnnnnnnnnnnnnnnnnnnnnnnnnnnnnnnnnnnnnnnnnnnnnnnnnnnnnnnnnnnnnnnnnnnnnnnnnnnnnnnnnnnnnnnnnnnnnnnnnnnnnnnnnnnnnnnnnnnnnnnnnnnnnnnnnnnnnnnnnnnnnnnnnnnnnnnnnnnnnnnnnnnnnnnnnnnnnnnnnnnnnnnnnnnnnnnnnnnnnnnnnnnnnnnnnnnnnnnnnnnnnnnnnnnnnnnnnnnnnnnnnnnnnnnnnnnnnnnnnnnnnnnnnnnnnnnnnnnnnnnnnnnnnnnnnnnnnnnnnnnnnnnnnnnnnnnnnnnnnnnnnnnnnnnnnnnnnnnnnnnnnnnnnnnnnnnnnnnnnnnnnnnnnnnnnnnnnnnnnnnnnnnnnnnnnnnnnnnnnnnnnnnnnnnnnnnnnnnnnnnnnnnnnnnnnnnnnnnnnnnnnnnnnnnnnnnnnnnnnnnnnnnnnnnnnnnnnnnnnnnnnnnnnnnnnnnnnnnnnnnnnnnnnnnnnnnnnnnnnnnnnnnnnnnnnnnnnnnnnnnnnnnnnnnnnnnnnnnnnnnnnnnnnnnnnnnnnnnnnnnnnnnnnnnnnnnnnnnnnnnnnnnnnnnnnnnnnnnnnnnnnnnnnnnnnnnnnnnnnnnnnnnnnnnnnnnnnnnnnnnnnnnnnnnnnnnnnnnnnnnnnnnnnnnnnnnnnnnnnnnnnnnnnnnnnnnnnnnnnnnnnnnnnnnnnnnnnnnnnnnnnnnnnnnnnnnnnnnnnnnnnnnnnnnnnnnnnnnnnnnnnnnnnnnnnnnnnnnnnnnnnnnnnnnnnnnnnnnnnnnnnnnnnnnnnnnnnnnnnnnnnnnnnnnnnnnnnnnnnnnnnnnnnnnnnnnnnnnnnnnnnnnnnnnnnnnnnnnnnnnnnnnnnnnnnnnnnnnnnnnnnnnnnnnnnnnnnnnnnnnnnnnnnnnnnnnnnnnnnnnnnnnnnnnnnnnnnnnnnnnnnnnnnnnnnnnnnnnnnnnnnnnnnnnnnnnnnnnnnnnnnnnnnnnnnnnnnnnnnnnnnnnnnnnnnnnnnnnnnnnnnnnnnnnnnnnnnnnnnnnnnnnnnnnnnnnnnnnnnnnnnnnnnnnnnnnnnnnnnnnnnnnnnnnnnnnnnnnnnnnnnnnnnnnnnnnnnnnnnnnnnnnnnnnnnnnnnnnnnnnnnnnnnnnnnnnnnnnnnnnnnnnnnnnnnnnnnnnnnnnnnnnnnnnnnnnnnnnnnnnnnnnnnnnnnnnnnnnnnnnnnnnnnnnnnnnnnnnnnnnnnnnnnnnnnnnnnnnnnnnnnnnnnnnnnnnnnnnnnnnnnnnnnnnnnnnnnnnnnnnnnnnnnnnnnnnnnnnnnnnnnnnnnnnnnnnnnnnnnnnnnnnnnnnnnnnnnnnnnnnnnnnnnnnnnnnnnnnnnnnnnnnnnnnnnnnnnnnnnnnnnnnnnnnnnnnnnnnnnnnnnnnnnnnnnnnnnnnnnnnnnnnnnnnnnnnnnnnnnnnnnnnnnnnnnnnnnnnnnnnnnnnnnnnnnnnnnnnnnnnnnnnnnnnnnnnnnnnnnnnnnnnnnnnnnnnnnnnnnnnnnnnnnnnnnnnnnnnnnnnnnnnnnnnnnnnnnnnnnnnnnnnnnnnnnnnnnnnnnnnnnnnnnnnnnnnnnnnnnnnnnnnnnnnnnnnnnnnnnnnnnnnnnnnnnnnnnnnnnnnnnnnnnnnnnnnnnnnnnnnnnnnnnnnnnnnnnnnnnnnnnnnnnnnnnnnnnnnnnnnnnnnnnnnnnnnnnnnnnnnnnnnnnnnnnnnnnnnnnnnnnnnnnnnnnnnnnnnnnnnnnnnnnnnnnnnnnnnnnnnnnnnnnnnnnnnnnnnnnnnnnnnnnnnnnnnnnnnnnnnnnnnnnnnnnnnnnnnnnnnnnnnnnnnnnnnnnnnnnnnnnnnnnnnnnnnnnnnnnnnnnnnnnnnnnnnnnnnnnnnnnnnnnnnnnnnnnnnnnnnnnnnnnnnnnnnnnnnnnnnnnnnnnnnnnnnnnnnnnnnnnnnnnnnnnnnnnnnnnnnnnnnnnnnnnnnnnnnnnnnnnnnnnnnnnnnnnnnnnnnnnnnnnnnnnnnnnnnnnnnnnnnnnnnnnnnnnnnnnnnnnnnnnnnnnnnnnnnnnnnnnnnnnnnnnnnnnnnnnnnnnnnnnnnnnnnnnnnnnnnnnnnnnnnnnnnnnnnnnnnnnnnnnnnnnnnnnnnnnnnnnnnnnnnnnnnnnnnnnnnnnnnnnnnnnnnnnnnnnnnnnnnnnnnnnnnnnnnnnnnnnnnnnnnnnnnnnnnnnnnnnnnnnnnnnnnnnnnnnnnnnnnnnnnnnnnnnnnnnnnnnnnnnnnnnnnnnnnnnnnnnnnnnnnnnnnnnnnnnnnnnnnnnnnnnnnnnnnnnnnnnnnnnnnnnnnnnnnnnnnnnnnnnnnnnnnnnnnnnnnnnnnnnnnnnnnnnnnnnnnnnnnnnnnnnnnnnnnnnnnnnnnnnnnnnnnnnnnnnnnnnnnnnnnnnnnnnnnnnnnnnnnnnnnnnnnnnnnnnnnnnnnnnnnnnnnnnnnnnnnnnnnnnnnnnnnnnnnnnnnnnnnnnnnnnnnnnnnnnnnnnnnnnnnnnnnnnnnnnnnnnnnnnnnnnnnnnnnnnnnnnnnnnnnnnnnnnnnnnnnnnnnnnnnnnnnnnnnnnnnnnnnnnnnnnnnnnnnnnnnnnnnnnnnnnnnnnnnnnnnnnnnnnnnnnnnnnnnnnnnnnnnnnnnnnnnnnnnnnnnnnnnnnnnnnnnnnnnnnnnnnnnnnnnnnnnnnnnnnnnnnnnnnnnnnnnnnnnnnnnnnnnnnnnnnnnnnnnnnnnnnnnnnnnnnnnnnnnnnnnnnnnnnnnnnnnnnnnnnnnnnnnnnnnnnnnnnnnnnnnnnnnnnnnnnnnnnnnnnnnnnnnnnnnnnnnnnnnnnnnnnnnnnnnnnnnnnnnnnnnnnnnnnnnnnnnnnnnnnnnnnnnnnnnnnnnnnnnnnnnnnnnnnnnnnnnnnnnnnnnnnnnnnnnnnnnnnnnnnnnnnnnnnnnnnnnnnnnnnnnnnnnnnnnnnnnnnnnnnnnnnnnnnnnnnnnnnnnnnnnnnnnnnnnnnnnnnnnnnnnnnnnnnnnnnnnnnnnnnnnnnnnnnnnnnnnnnnnnnnnnnnnnnnnnnnnnnnnnnnnnnnnnnnnnnnnnnnnnnnnnnnnnnnnnnnnnnnnnnnnnnnnnnnnnnnnnnnnnnnnnnnnnnnnnnnnnnnnnnnnnnnnnnnnnnnnnnnnnnnnnnnnnnnnnnnnnnnnnnnnnnnnnnnnnnnnnnnnnnnnnnnnnnnnnnnnnnnnnnnnnnnnnnnnnnnnnnnnnnnnnnnnnnnnnnnnnnnnnnnnnnnnnnnnnnnnnnnnnnnnnnnnnnnnnnnnnnnnnnnnnnnnnnnnnnnnnnnnnnnnnnnnnnnnnnnnnnnnnnnnnnnnnnnnnnnnnnnnnnnnnnnnnnnnnnnnnnnnnnnnnnnnnnnnnnnnnnnnnnnnnnnnnnnnnnnnnnnnnnnnnnnnnnnnnnnnnnnnnnnnnnnnnnnnnnnnnnnnnnnnnnnnnnnnnnnnnnnnnnnnnnnnnnnnnnnnnnnnnnnnnnnnnnnnnnnnnnnnnnnnnnnnnnnnnnnnnnnnnnnnnnnnnnnnnnnnnnnnnnnnnnnnnnnnnnnnnnnnnnnnnnnnnnnnnnnnnnnnnnnnnnnnnnnnnnnnnnnnnnnnnnnnnnnnnnnnnnnnnnnnnnnnnnnnnnnnnnnnnnnnnnnnnnnnnnnnnnnnnnnnnnnnnnnnnnnnnnnnnnnnnnnnnnnnnnnnnnnnnnnnnnnnnnnnnnnnnnnnnnnnnnnnnnnnnnnnnnnnnnnnnnnnnnnnnnnnnnnnnnnnnnnnnnnnnnnnnnnnnnnnnnnnnnnnnnnnnnnnnnnnnnnnnnnnnnnnnnnnnnnnnnnnnnnnnnnnnnnnnnnnnnnnnnnnnnnnnnnnnnnnnnnnnnnnnnnnnnnnnnnnnnnnnnnnnnnnnnnnnnnnnnnnnnnnnnnnnnnnnnnnnnnnnnnnnnnnnnnnnnnnnnnnnnnnnnnnnnnnnnnnnnnnnnnnnnnnnnnnnnnnnnnnnnnnnnnnnnnnnnnnnnnnnnnnnnnnnnnnnnnnnnnnnnnnnnnnnnnnnnnnnnnnnnnnnnnnnnnnnnnnnnnnnnnnnnnnnnnnnnnnnnnnnnnnnnnnnnnnnnnnnnnnnnnnnnnnnnnnnnnnnnnnnnnnnnnnnnnnnnnnnnnnnnnnnnnnnnnnnnnnnnnnnnnnnnnnnnnnnnnnnnnnnnnnnnnnnnnnnnnnnnnnnnnnnnnnnnnnnnnnnnnnnnnnnnnnnnnnnnnnnnnnnnnnnnnnnnnnnnnnnnnnnnnnnnnnnnnnnnnnnnnnnnnnnnnnnnnnnnnnnnnnnnnnnnnnnnnnnnnnnnnnnnnnnnnnnnnnnnnnnnnnnnnnnnnnnnnnnnnnnnnnnnnnnnnnnnnnnnnnnnnnnnnnnnnnnnnnnnnnnnnnnnnnnnnnnnnnnnnnnnnnnnnnnnnnnnnnnnnnnnnnnnnnnnnnnnnnnnnnnnnnnnnnnnnnnnnnnnnnnnnnnnnnnnnnnnnnnnnnnnnnnnnnnnnnnnnnnnnnnnnnnnnnnnnnnnnnnnnnnnnnnnnnnnnnnnnnnnnnnnnnnnnnnnnnnnnnnnnnnnnnnnnnnnnnnnnnnnnnnnnnnnnnnnnnnnnnnnnnnnnnnnnnnnnnnnnnnnnnnnnnnnnnnnnnnnnnnnnnnnnnnnnnnnnnnnnnnnnnnnnnnnnnnnnnnnnnnnnnnnnnnnnnnnnnnnnnnnnnnnnnnnnnnnnnnnnnnnnnnnnnnnnnnnnnnnnnnnnnnnnnnnnnnnnnnnnnnnnnnnnnnnnnnnnnnnnnnnnnnnnnnnnnnnnnnnnnnnnnnnnnnnnnnnnnnnnnnnnnnnnnnnnnnnnnnnnnnnnnnnnnnnnnnnnnnnnnnnnnnnnnnnnnnnnnnnnnnnnnnnnnnnnnnnnnnnnnnnnnnnnnnnnnnnnnnnnnnnnnnnnnnnnnnnnnnnnnnnnnnnnnnnnnnnnnnnnnnnnnnnnnnnnnnnnnnnnnnnnnnnnnnnnnnnnnnnnnnnnnnnnnnnnnnnnnnnnnnnnnnnnnnnnnnnnnnnnnnnnnnnnnnnnnnnnnnnnnnnnnnnnnnnnnnnnnnnnnnnnnnnnnnnnnnnnnnnnnnnnnnnnnnnnnnnnnnnnnnnnnnnnnnnnnnnnnnnnnnnnnnnnnnnnnnnnnnnnnnnnnnnnnnnnnnnnnnnnnnnnnnnnnnnnnnnnnnnnnnnnnnnnnnnnnnnnnnnnnnnnnnnnnnnnnnnnnnnnnnnnnnnnnnnnnnnnnnnnnnnnnnnnnnnnnnnnnnnnnnnnnnnnnnnnnnnnnnnnnnnnnnnnnnnnnnnnnnnnnnnnnnnnnnnnnnnnnnnnnnnnnnnnnnnnnnnnnnnnnnnnnnnnnnnnnnnnnnnnnnnnnnnnnnnnnnnnnnnnnnnnnnnnnnnnnnnnnnnnnnnnnnnnnnnnnnnnnnnnnnnnnnnnnnnnnnnnnnnnnnnnnnnnnnnnnnnnnnnnnnnnnnnnnnnnnnnnnnnnnnnnnnnnnnnnnnnnnnnnnnnnnnnnnnnnnnnnnnnnnnnnnnnnnnnnnnnnnnnnnnnnnnnnnnnnnnnnnnnnnnnnnnnnnnnnnnnnnnnnnnnnnnnnnnnnnnnnnnnnnnnnnnnnnnnnnnnnnnnnnnnnnnnnnnnnnnnnnnnnnnnnnnnnnnnnnnnnnnnnnnnnnnnnnnnnnnnnnnnnnnnnnnnnnnnnnnnnnnnnnnnnnnnnnnnnnnnnnnnnnnnnnnnnnnnnnnnnnnnnnnnnnnnnnnnnnnnnnnnnnnnnnnnnnnnnnnnnnnnnnnnnnnnnnnnnnnnnnnnnnnnnnnnnnnnnnnnnnnnnnnnnnnnnnnnnnnnnnnnnnnnnnnnnnnnnnnnnnnnnnnnnnnnnnnnnnnnnnnnnnnnnnnnnnnnnnnnnnnnnnnnnnnnnnnnnnnnnnnnnnnnnnnnnnnnnnnnnnnnnnnnnnnnnnnnnnnnnnnnnnnnnnnnnnnnnnnnnnnnnnnnnnnnnnnnnnnnnnnnnnnnnnnnnnnnnnnnnnnnnnnnnnnnnnnnnnnnnnnnnnnnnnnnnnnnnnnnnnnnnnnnnnnnnnnnnnnnnnnnnnnnnnnnnnnnnnnnnnnnnnnnnnnnnnnnnnnnnnnnnnnnnnnnnnnnnnnnnnnnnnnnnnnnnnnnnnnnnnnnnnnnnnnnnnnnnnnnnnnnnnnnnnnnnnnnnnnnnnnnnnnnnnnnnnnnnnnnnnnnnnnnnnnnnnnnnnnnnnnnnnnnnnnnnnnnnnnnnnnnnnnnnnnnnnnnnnnnnnnnnnnnnnnnnnnnnnnnnnnnnnnnnnnnnnnnnnnnnnnnnnnnnnnnnnnnnnnnnnnnnnnnnnnnnnnnnnnnnnnnnnnnnnnnnnnnnnnnnnnnnnnnnnnnnnnnnnnnnnnnnnnnnnnnnnnnnnnnnnnnnnnnnnnnnnnnnnnnnnnnnnnnnnnnnnnnnnnnnnnnnnnnnnnnnnnnnnnnnnnnnnnnnnnnnnnnnnnnnnnnnnnnnnnnnnnnnnnnnnnnnnnnnnnnnnnnnnnnnnnnnnnnnnnnnnnnnnnnnnnnnnnnnnnnnnnnnnnnnnnnnnnnnnnnnnnnnnnnnnnnnnnnnnnnnnnnnnnnnnnnnnnnnnnnnnnnnnnnnnnnnnnnnnnnnnnnnnnnnnnnnnnnnnnnnnnnnnnnnnnnnnnnnnnnnnnnnnnnnnnnnnnnnnnnnnnnnnnnnnnnnnnnnnnnnnnnnnnnnnnnnnnnnnnnnnnnnnnnnnnnnnnnnnnnnnnnnnnnnnnnnnnnnnnnnnnnnnnnnnnnnnnnnnnnnnnnnnnnnnnnnnnnnnnnnnnnnnnnnnnnnnnnnnnnnnnnnnnnnnnnnnnnnnnnnnnnnnnnnnnnnnnnnnnnnnnnnnnnnnnnnnnnnnnnnnnnnnnnnnnnnnnnnnnnnnnnnnnnnnnnnnnnnnnnnnnnnnnnnnnnnnnnnnnnnnnnnnnnnnnnnnnnnnnnnnnnnnnnnnnnnnnnnnnnnnnnnnnnnnnnnnnnnnnnnnnnnnnnnnnnnnnnnnnnnnnnnnnnnnnnnnnnnnnnnnnnnnnnnnnnnnnnnnnnnnnnnnnnnnnnnnnnnnnnnnnnnnnnnnnnnnnnnnnnnnnnnnnnnnnnnnnnnnnnnnnnnnnnnnnnnnnnnnnnnnnnnnnnnnnnnnnnnnnnnnnnnnnnnnnnnnnnnnnnnnnnnnnnnnnnnnnnnnnnnnnnnnnnnnnnnnnnnnnnnnnnnnnnnnnnnnnnnnnnnnnnnnnnnnnnnnnnnnnnnnnnnnnnnnnnnnnnnnnnnnnnnnnnnnnnnnnnnnnnnnnnnnnnnnnnnnnnnnnnnnnnnnnnnnnnnnnnnnnnnnnnnnnnnnnnnnnnnnnnnnnnnnnnnnnnnnnnnnnnnnnnnnnnnnnnnnnnnnnnnnnnnnnnnnnnnnnnnnnnnnnnnnnnnnnnnnnnnnnnnnnnnnnnnnnnnnnnnnnnnnnnnnnnnnnnnnnnnnnnnnnnnnnnnnnnnnnnnnnnnnnnnnnnnnnnnnnnnnnnnnnnnnnnnnnnnnnnnnnnnnnnnnnnnnnnnnnnnnnnnnnnnnnnnnnnnnnnnnnnnnnnnnnnnnnnnnnnnnnnnnnnnnnnnnnnnnnnnnnnnnnnnnnnnnnnnnnnnnnnnnnnnnnnnnnnnnnnnnnnnnnnnnnnnnnnnnnnnnnnnnnnnnnnnnnnnnnnnnnnnnnnnnnnnnnnnnnnnnnnnnnnnnnnnnnnnnnnnnnnnnnnnnnnnnnnnnnnnnnnnnnnnnnnnnnnnnnnnnnnnnnnnnnnnnnnnnnnnnnnnnnnnnnnnnnnnnnnnnnnnnnnnnnnnnnnnnnnnnnnnnnnnnnnnnnnnnnnnnnnnnnnnnnnnnnnnnnnnnnnnnnnnnnnnnnnnnnnnnnnnnnnnnnnnnnnnnnnnnnnnnnnnnnnnnnnnnnnnnnnnnnnnnnnnnnnnnnnnnnnnnnnnnnnnnnnnnnnnnnnnnnnnnnnnnnnnnnnnnnnnnnnnnnnnnnnnnnnnnnnnnnnnnnnnnnnnnnnnnnnnnnnnnnnnnnnnnnnnnnnnnnnnnnnnnnnnnnnnnnnnnnnnnnnnnnnnnnnnnnnnnnnnnnnnnnnnnnnnnnnnnnnnnnnnnnnnnnnnnnnnnnnnnnnnnnnnnnnnnnnnnnnnnnnnnnnnnnnnnnnnnnnnnnnnnnnnnnnnnnnnnnnnnnnnnnnnnnnnnnnnnnnnnnnnnnnnnnnnnnnnnnnnnnnnnnnnnnnnnnnnnnnnnnnnnnnnnnnnnnnnnnnnnnnnnnnnnnnnnnnnnnnnnnnnnnnnnnnnnnnnnnnnnnnnnnnnnnnnnnnnnnnnnnnnnnnnnnnnnnnnnnnnnnnnnnnnnnnnnnnnnnnnnnnnnnnnnnnnnnnnnnnnnnnnnnnnnnnnnnnnnnnnnnnnnnnnnnnnnnnnnnnnnnnnnnnnnnnnnnnnnnnnnnnnnnnnnnnnnnnnnnnnnnnnnnnnnnnnnnnnnnnnnnnnnnnnnnnnnnnnnnnnnnnnnnnnnnnnnnnnnnnnnnnnnnnnnnnnnnnnnnnnnnnnnnnnnnnnnnnnnnnnnnnnnnnnnnnnnnnnnnnnnnnnnnnnnnnnnnnnnnnnnnnnnnnnnnnnnnnnnnnnnnnnnnnnnnnnnnnnnnnnnnnnnnnnnnnnnnnnnnnnnnnnnnnnnnnnnnnnnnnnnnnnnnnnnnnnnnnnnnnnnnnnnnnnnnnnnnnnnnnnnnnnnnnnnnnnnnnnnnnnnnnnnnnnnnnnnnnnnnnnnnnnnnnnnnnnnnnnnnnnnnnnnnnnnnnnnnnnnnnnnnnnnnnnnnnnnnnnnnnnnnnnnnnnnnnnnnnnnnnnnnnnnnnnnnnnnnnnnnnnnnnnnnnnnnnnnnnnnnnnnnnnnnnnnnnnnnnnnnnnnnnnnnnnnnnnnnnnnnnnnnnnnnnnnnnnnnnnnnnnnnnnnnnnnnnnnnnnnnnnnnnnnnnnnnnnnnnnnnnnnnnnnnnnnnnnnnnnnnnnnnnnnnnnnnnnnnnnnnnnnnnnnnnnnnnnnnnnnnnnnnnnnnnnnnnnnnnnnnnnnnnnnnnnnnnnnnnnnnnnnnnnnnnnnnnnnnnnnnnnnnnnnnnnnnnnnnnnnnnnnnnnnnnnnnnnnnnnnnnnnnnnnnnnnnnnnnnnnnnnnnnnnnnnnnnnnnnnnnnnnnnnnnnnnnnnnnnnnnnnnnnnnnnnnnnnnnnnnnnnnnnnnnnnnnnnnnnnnnnnnnnnnnnnnnnnnnnnnnnnnnnnnnnnnnnnnnnnnnnnnnnnnnnnnnnnnnnnnnnnnnnnnnnnnnnnnnnnnnnnnnnnnnnnnnnnnnnnnnnnnnnnnnnnnnnnnnnnnnnnnnnnnnnnnnnnnnnnnnnnnnnnnnnnnnnnnnnnnnnnnnnnnnnnnnnnnnnnnnnnnnnnnnnnnnnnnnnnnnnnnnnnnnnnnnnnnnnnnnnnnnnnnnnnnnnnnnnnnnnnnnnnnnnnnnnnnnnnnnnnnnnnnnnnnnnnnnnnnnnnnnnnnnnnnnnnnnnnnnnnnnnnnnnnnnnnnnnnnnnnnnnnnnnnnnnnnnnnnnnnnnnnnnnnnnnnnnnnnnnnnnnnnnnnnnnnnnnnnnnnnnnnnnnnnnnnnnnnnnnnnnnnnnnnnnnnnnnnnnnnnnnnnnnnnnnnnnnnnnnnnnnnnnnnnnnnnnnnnnnnnnnnnnnnnnnnnnnnnnnnnnnnnnnnnnnnnnnnnnnnnnnnnnnnnnnnnnnnnnnnnnnnnnnnnnnnnnnnnnnnnnnnnnnnnnnnnnnnnnnnnnnnnnnnnnnnnnnnnnnnnnnnnnnnnnnnnnnnnnnnnnnnnnnnnnnnnnnnnnnnnnnnnnnnnnnnnnnnnnnnnnnnnnnnnnnnnnnnnnnnnnnnnnnnnnnnnnnnnnnnnnnnnnnnnnnnnnnnnnnnnnnnnnnnnnnnnnnnnnnnnnnnnnnnnnnnnnnnnnnnnnnnnnnnnnnnnnnnnnnnnnnnnnnnnnnnnnnnnnnnnnnnnnnnnnnnnnnnnnnnnnnnnnnnnnnnnnnnnnnnnnnnnnnnnnnnnnnnnnnnnnnnnnnnnnnnnnnnnnnnnnnnnnnnnnnnnnnnnnnnnnnnnnnnnnnnnnnnnnnnnnnnnnnnnnnnnnnnnnnnnnnnnnnnnnnnnnnnnnnnnnnnnnnnnnnnnnnnnnnnnnnnnnnnnnnnnnnnnnnnnnnnnnnnnnnnnnnnnnnnnnnnnnnnnnnnnnnnnnnnnnnnnnnnnnnnnnnnnnnnnnnnnnnnnnnnnnnnnnnnnnnnnnnnnnnnnnnnnnnnnnnnnnnnnnnnnnnnnnnnnnnnnnnnnnnnnnnnnnnnnnnnnnnnnnnnnnnnnnnnnnnnnnnnnnnnnnnnnnnnnnnnnnnnnnnnnnnnnnnnnnnnnnnnnnnnnnnnnnnnnnnnnnnnnnnnnnnnnnnnnnnnnnnnnnnnnnnnnnnnnnnnnnnnnnnnnnnnnnnnnnnnnnnnnnnnnnnnnnnnnnnnnnnnnnnnnnnnnnnnnnnnnnnnnnnnnnnnnnnnnnnnnnnnnnnnnnnnnnnnnnnnnnnnnnnnnnnnnnnnnnnnnnnnnnnnnnnnnnnnnnnnnnnnnnnnnnnnnnnnnnnnnnnnnnnnnnnnnnnnnnnnnnnnnnnnnnnnnnnnnnnnnnnnnnnnnnnnnnnnnnnnnnnnnnnnnnnnnnnnnnnnnnnnnnnnnnnnnnnnnnnnnnnnnnnnnnnnnnnnnnnnnnnnnnnnnnnnnnnnnnnnnnnnnnnnnnnnnnnnnnnnnnnnnnnnnnnnnnnnnnnnnnnnnnnnnnnnnnnnnnnnnnnnnnnnnnnnnnnnnnnnnnnnnnnnnnnnnnnnnnnnnnnnnnnnnnnnnnnnnnnnnnnnnnnnnnnnnnnnnnnnnnnnnnnnnnnnnnnnnnnnnnnnnnnnnnnnnnnnnnnnnnnnnnnnnnnnnnnnnnnnnnnnnnnnnnnnnnnnnnnnnnnnnnnnnnnnnnnnnnnnnnnnnnnnnnnnnnnnnnnnnnnnnnnnnnnnnnnnnnnnnnnnnnnnnnnnnnnnnnnnnnnnnnnnnnnnnnnnnnnnnnnnnnnnnnnnnnnnnnnnnnnnnnnnnnnnnnnnnnnnnnnnnnnnnnnnnnnnnnnnnnnnnnnnnnnnnnnnnnnnnnnnnnnnnnnnnnnnnnnnnnnnnnnnnnnnnnnnnnnnnnnnnnnnnnnnnnnnnnnnnnnnnnnnnnnnnnnnnnnnnnnnnnnnnnnnnnnnnnnnnnnnnnnnnnnnnnnnnnnnnnnnnnnnnnnnnnnnnnnnnnnnnnnnnnnnnnnnnnnnnnnnnnnnnnnnnnnnnnnnnnnnnnnnnnnnnnnnnnnnnnnnnnnnnnnnnnnnnnnnnnnnnnnnnnnnnnnnnnnnnnnnnnnnnnnnnnnnnnnnnnnnnnnnnnnnnnnnnnnnnnnnnnnnnnnnnnnnnnnnnnnnnnnnnnnnnnnnnnnnnnnnnnnnnnnnnnnnnnnnnnnnnnnnnnnnnnnnnnnnnnnnnnnnnnnnnnnnnnnnnnnnnnnnnnnnnnnnnnnnnnnnnnnnnnnnnnnnnnnnnnnnnnnnnnnnnnnnnnnnnnnnnnnnnnnnnnnnnnnnnnnnnnnnnnnnnnnnnnnnnnnnnnnnnnnnnnnnnnnnnnnnnnnnnnnnnnnnnnnnnnnnnnnnnnnnnnnnnnnnnnnnnnnnnnnnnnnnnnnnnnnnnnnnnnnnnnnnnnnnnnnnnnnnnnnnnnnnnnnnnnnnnnnnnnnnnnnnnnnnnnnnnnnnnnnnnnnnnnnnnnnnnnnnnnnnnnnnnnnnnnnnnnnnnnnnnnnnnnnnnnnnnnnnnnnnnnnnnnnnnnnnnnnnnnnnnnnnnnnnnnnnnnnnnnnnnnnnnnnnnnnnnnnnnnnnnnnnnnnnnnnnnnnnnnnnnnnnnnnnnnnnnnnnnnnnnnnnnnnnnnnnnnnnnnnnnnnnnnnnnnnnnnnnnnnnnnnnnnnnnnnnnnnnnnnnnnnnnnnnnnnnnnnnnnnnnnnnnnnnnnnnnnnnnnnnnnnnnnnnnnnnnnnnnnnnnnnnnnnnnnnnnnnnnnnnnnnnnnnnnnnnnnnnnnnnnnnnnnnnnnnnnnnnnnnnnnnnnnnnnnnnnnnnnnnnnnnnnnnnnnnnnnnnnnnnnnnnnnnnnnnnnnnnnnnnnnnnnnnnnnnnnnnnnnnnnnnnnnnnnnnnnnnnnnnnnnnnnnnnnnnnnnnnnnnnnnnnnnnnnnnnnnnnnnnnnnnnnnnnnnnnnnnnnnnnnnnnnnnnnnnnnnnnnnnnnnnnnnnnnnnnnnnnnnnnnnnnnnnnnnnnnnnnnnnnnnnnnnnnnnnnnnnnnnnnnnnnnnnnnnnnnnnnnnnnnnnnnnnnnnnnnnnnnnnnnnnnnnnnnnnnnnnnnnnnnnnnnnnnnnnnnnnnnnnnnnnnnnnnnnnnnnnnnnnnnnnnnnnnnnnnnnnnnnnnnnnnnnnnnnnnnnnnnnnnnnnnnnnnnnnnnnnnnnnnnnnnnnnnnnnnnnnnnnnnnnnnnnnnnnnnnnnnnnnnnnnnnnnnnnnnnnnnnnnnnnnnnnnnnnnnnnnnnnnnnnnnnnnnnnnnnnnnnnnnnnnnnnnnnnnnnnnnnnnnnnnnnnnnnnnnnnnnnnnnnnnnnnnnnnnnnnnnnnnnnnnnnnnnnnnnnnnnnnnnnnnnnnnnnnnnnnnnnnnnnnnnnnnnnnnnnnnnnnnnnnnnnnnnnnnnnnnnnnnnnnnnnnnnnnnnnnnnnnnnnnnnnnnnnnnnnnnnnnnnnnnnnnnnnnnnnnnnnnnnnnnnnnnnnnnnnnnnnnnnnnnnnnnnnnnnnnnnnnnnnnnnnnnnnnnnnnnnnnnnnnnnnnnnnnnnnnnnnnnnnnnnnnnnnnnnnnnnnnnnnnnnnnnnnnnnnnnnnnnnnnnnnnnnnnnnnnnnnnnnnnnnnnnnnnnnnnnnnnnnnnnnnnnnnnnnnnnnnnnnnnnnnnnnnnnnnnnnnnnnnnnnnnnnnnnnnnnnnnnnnnnnnnnnnnnnnnnnnnnnnnnnnnnnnnnnnnnnnnnnnnnnnnnnnnnnnnnnnnnnnnnnnnnnnnnnnnnnnnnnnnnnnnnnnnnnnnnnnnnnnnnnnnnnnnnnnnnnnnnnnnnnnnnnnnnnnnnnnnnnnnnnnnnnnnnnnnnnnnnnnnnnnnnnnnnnnnnnnnnnnnnnnnnnnnnnnnnnnnnnnnnnnnnnnnnnnnnnnnnnnnnnnnnnnnnnnnnnnnnnnnnnnnnnnnnnnnnnnnnnnnnnnnnnnnnnnnnnnnnnnnnnnnnnnnnnnnnnnnnnnnnnnnnnnnnnnnnnnnnnnnnnnnnnnnnnnnnnnnnnnnnnnnnnnnnnnnnnnnnnnnnnnnnnnnnnnnnnnnnnnnnnnnnnnnnnnnnnnnnnnnnnnnnnnnnnnnnnnnnnnnnnnnnnnnnnnnnnnnnnnnnnnnnnnnnnnnnnnnnnnnnnnnnnnnnnnnnnnnnnnnnnnnnnnnnnnnnnnnnnnnnnnnnnnnnnnnnnnnnnnnnnnnnnnnnnnnnnnnnnnnnnnnnnnnnnnnnnnnnnnnnnnnnnnnnnnnnnnnnnnnnnnnnnnnnnnnnnnnnnnnnnnnnnnnnnnnnnnnnnnnnnnnnnnnnnnnnnnnnnnnnnnnnnnnnnnnnnnnnnnnnnnnnnnnnnnnnnnnnnnnnnnnnnnnnnnnnnnnnnnnnnnnnnnnnnnnnnnnnnnnnnnnnnnnnnnnnnnnnnnnnnnnnnnnnnnnnnnnnnnnnnnnnnnnnnnnnnnnnnnnnnnnnnnnnnnnnnnnnnnnnnnnnnnnnnnnnnnnnnnnnnnnnnnnnnnnnnnnnnnnnnnnnnnnnnnnnnnnnnnnnnnnnnnnnnnnnnnnnnnnnnnnnnnnnnnnnnnnnnnnnnnnnnnnnnnnnnnnnnnnnnnnnnnnnnnnnnnnnnnnnnnnnnnnnnnnnnnnnnnnnnnnnnnnnnnnnnnnnnnnnnnnnnnnnnnnnnnnnnnnnnnnnnnnnnnnnnnnnnnnnnnnnnnnnnnnnnnnnnnnnnnnnnnnnnnnnnnnnnnnnnnnnnnnnnnnnnnnnnnnnnnnnnnnnnnnnnnnnnnnnnnnnnnnnnnnnnnnnnnnnnnnnnnnnnnnnnnnnnnnnnnnnnnnnnnnnnnnnnnnnnnnnnnnnnnnnnnnnnnnnnnnnnnnnnnnnnnnnnnnnnnnnnnnnnnnnnnnnnnnnnnnnnnnnnnnnnnnnnnnnnnnnnnnnnnnnnnnnnnnnnnnnnnnnnnnnnnnnnnnnnnnnnnnnnnnnnnnnnnnnnnnnnnnnnnnnnnnnnnnnnnnnnnnnnnnnnnnnnnnnnnnnnnnnnnnnnnnnnnnnnnnnnnnnnnnnnnnnnnnnnnnnnnnnnnnnnnnnnnnnnnnnnnnnnnnnnnnnnnnnnnnnnnnnnnnnnnnnnnnnnnnnnnnnnnnnnnnnnnnnnnnnnnnnnnnnnnnnnnnnnnnnnnnnnnnnnnnnnnnnnnnnnnnnnnnnnnnnnnnnnnnnnnnnnnnnnnnnnnnnnnnnnnnnnnnnnnnnnnnnnnnnnnnnnnnnnnnnnnnnnnnnnnnnnnnnnnnnnnnnnnnnnnnnnnnnnnnnnnnnnnnnnnnnnnnnnnnnnnnnnnnnnnnnnnnnnnnnnnnnnnnnnnnnnnnnnnnnnnnnnnnnnnnnnnnnnnnnnnnnnnnnnnnnnnnnnnnnnnnnnnnnnnnnnnnnnnnnnnnnnnnnnnnnnnnnnnnnnnnnnnnnnnnnnnnnnnnnnnnnnnnnnnnnnnnnnnnnnnnnnnnnnnnnnnnnnnnnnnnnnnnnnnnnnnnnnnnnnnnnnnnnnnnnnnnnnnnnnnnnnnnnnnnnnnnnnnnnnnnnnnnnnnnnnnnnnnnnnnnnnnnnnnnnnnnnnnnnnnnnnnnnnnnnnnnnnnnnnnnnnnnnnnnnnnnnnnnnnnnnnnnnnnnnnnnnnnnnnnnnnnnnnnnnnnnnnnnnnnnnnnnnnnnnnnnnnnnnnnnnnnnnnnnnnnnnnnnnnnnnnnnnnnnnnnnnnnnnnnnnnnnnnnnnnnnnnnnnnnnnnnnnnnnnnnnnnnnnnnnnnnnnnnnnnnnnnnnnnnnnnnnnnnnnnnnnnnnnnnnnnnnnnnnnnnnnnnnnnnnnnnnnnnnnnnnnnnnnnnnnnnnnnnnnnnnnnnnnnnnnnnnnnnnnnnnnnnnnnnnnnnnnnnnnnnnnnnnnnnnnnnnnnnnnnnnnnnnnnnnnnnnnnnnnnnnnnnnnnnnnnnnnnnnnnnnnnnnnnnnnnnnnnnnnnnnnnnnnnnnnnnnnnnnnnnnnnnnnnnnnnnnnnnnnnnnnnnnnnnnnnnnnnnnnnnnnnnnnnnnnnnnnnnnnnnnnnnnnnnnnnnnnnnnnnnnnnnnnnnnnnnnnnnnnnnnnnnnnnnnnnnnnnnnnnnnnnnnnnnnnnnnnnnnnnnnnnnnnnnnnnnnnnnnnnnnnnnnnnnnnnnnnnnnnnnnnnnnnnnnnnnnnnnnnnnnnnnnnnnnnnnnnnnnnnnnnnnnnnnnnnnnnnnnnnnnnnnnnnnnnnnnnnnnnnnnnnnnnnnnnnnnnnnnnnnnnnnnnnnnnnnnnnnnnnnnnnnnnnnnnnnnnnnnnnnnnnnnnnnnnnnnnnnnnnnnnnnnnnnnnnnnnnnnnnnnnnnnnnnnnnnnnnnnnnnnnnnnnnnnnnnnnnnnnnnnnnnnnnnnnnnnnnnnnnnnnnnnnnnnnnnnnnnnnnnnnnnnnnnnnnnnnnnnnnnnnnnnnnnnnnnnnnnnnnnnnnnnnnnnnnnnnnnnnnnnnnnnnnnnnnnnnnnnnnnnnnnnnnnnnnnnnnnnnnnnnnnnnnnnnnnnnnnnnnnnnnnnnnnnnnnnnnnnnnnnnnnnnnnnnnnnnnnnnnnnnnnnnnnnnnnnnnnnnnnnnnnnnnnnnnnnnnnnnnnnnnnnnnnnnnnnnnnnnnnnnnnnnnnnnnnnnnnnnnnnnnnnnnnnnnnnnnnnnnnnnnnnnnnnnnnnnnnnnnnnnnnnnnnnnnnnnnnnnnnnnnnnnnnnnnnnnnnnnnnnnnnnnnnnnnnnnnnnnnnnnnnnnnnnnnnnnnnnnnnnnnnnnnnnnnnnnnnnnnnnnnnnnnnnnnnnnnnnnnnnnnnnnnnnnnnnnnnnnnnnnnnnnnnnnnnnnnnnnnnnnnnnnnnnnnnnnnnnnnnnnnnnnnnnnnnnnnnnnnnnnnnnnnnnnnnnnnnnnnnnnnnnnnnnnnnnnnnnnnnnnnnnnnnnnnnnnnnnnnnnnnnnnnnnnnnnnnnnnnnnnnnnnnnnnnnnnnnnnnnnnnnnnnnnnnnnnnnnnnnnnnnnnnnnnnnnnnnnnnnnnnnnnnnnnnnnnnnnnnnnnnnnnnnnnnnnnnnnnnnnnnnnnnnnnnnnnnnnnnnnnnnnnnnnnnnnnnnnnnnnnnnnnnnnnnnnnnnnnnnnnnnnnnnnnnnnnnnnnnnnnnnnnnnnnnnnnnnnnnnnnnnnnnnnnnnnnnnnnnnnnnnnnnnnnnnnnnnnnnnnnnnnnnnnnnnnnnnnnnnnnnnnnnnnnnnnnnnnnnnnnnnnnnnnnnnnnnnnnnnnnnnnnnnnnnnnnnnnnnnnnnnnnnnnnnnnnnnnnnnnnnnnnnnnnnnnnnnnnnnnnnnnnnnnnnnnnnnnnnnnnnnnnnnnnnnnnnnnnnnnnnnnnnnnnnnnnnnnnnnnnnnnnnnnnnnnnnnnnnnnnnnnnnnnnnnnnnnnnnnnnnnnnnnnnnnnnnnnnnnnnnnnnnnnnnnnnnnnnnnnnnnnnnnnnnnnnnnnnnnnnnnnnnnnnnnnnnnnnnnnnnnnnnnnnnnnnnnnnnnnnnnnnnnnnnnnnnnnnnnnnnnnnnnnnnnnnnnnnnnnnnnnnnnnnnnnnnnnnnnnnnnnnnnnnnnnnnnnnnnnnnnnnnnnnnnnnnnnnnnnnnnnnnnnnnnnnnnnnnnnnnnnnnnnnnnnnnnnnnnnnnnnnnnnnnnnnnnnnnnnnnnnnnnnnnnnnnnnnnnnnnnnnnnnnnnnnnnnnnnnnnnnnnnnnnnnnnnnnnnnnnnnnnnnnnnnnnnnnnnnnnnnnnnnnnnnnnnnnnnnnnnnnnnnnnnnnnnnnnnnnnnnnnnnnnnnnnnnnnnnnnnnnnnnnnnnnnnnnnnnnnnnnnnnnnnnnnnnnnnnnnnnnnnnnnnnnnnnnnnnnnnnnnnnnnnnnnnnnnnnnnnnnnnnnnnnnnnnnnnnnnnnnnnnnnnnnnnnnnnnnnnnnnnnnnnnnnnnnnnnnnnnnnnnnnnnnnnnnnnnnnnnnnnnnnnnnnnnnnnnnnnnnnnnnnnnnnnnnnnnnnnnnnnnnnnnnnnnnnnnnnnnnnnnnnnnnnnnnnnnnnnnnnnnnnnnnnnnnnnnnnnnnnnnnnnnnnnnnnnnnnnnnnnnnnnnnnnnnnnnnnnnnnnnnnnnnnnnnnnnnnnnnnnnnnnnnnnnnnnnnnnnnnnnnnnnnnnnnnnnnnnnnnnnnnnnnnnnnnnnnnnnnnnnnnnnnnnnnnnnnnnnnnnnnnnnnnnnnnnnnnnnnnnnnnnnnnnnnnnnnnnnnnnnnnnnnnnnnnnnnnnnnnnnnnnnnnnnnnnnnnnnnnnnnnnnnnnnnnnnnnnnnnnnnnnnnnnnnnnnnnnnnnnnnnnnnnnnnnnnnnnnnnnnnnnnnnnnnnnnnnnnnnnnnnnnnnnnnnnnnnnnnnnnnnnnnnnnnnnnnnnnnnnnnnnnnnnnnnnnnnnnnnnnnnnnnnnnnnnnnnnnnnnnnnnnnnnnnnnnnnnnnnnnnnnnnnnnnnnnnnnnnnnnnnnnnnnnnnnnnnnnnnnnnnnnnnnnnnnnnnnnnnnnnnnnnnnnnnnnnnnnnnnnnnnnnnnnnnnnnnnnnnnnnnnnnnnnnnnnnnnnnnnnnnnnnnnnnnnnnnnnnnnnnnnnnnnnnnnnnnnnnnnnnnnnnnnnnnnnnnnnnnnnnnnnnnnnnnnnnnnnnnnnnnnnnnnnnnnnnnnnnnnnnnnnnnnnnnnnnnnnnnnnnnnnnnnnnnnnnnnnnnnnnnnnnnnnnnnnnnnnnnnnnnnnnnnnnnnnnnnnnnnnnnnnnnnnnnnnnnnnnnnnnnnnnnnnnnnnnnnnnnnnnnnnnnnnnnnnnnnnnnnnnnnnnnnnnnnnnnnnnnnnnnnnnnnnnnnnnnnnnnnnnnnnnnnnnnnnnnnnnnnnnnnnnnnnnnnnnnnnnnnnnnnnnnnnnnnnnnnnnnnnnnnnnnnnnnnnnnnnnnnnnnnnnnnnnnnnnnnnnnnnnnnnnnnnnnnnnnnnnnnnnnnnnnnnnnnnnnnnnnnnnnnnnnnnnnnnnnnnnnnnnnnnnnnnnnnnnnnnnnnnnnnnnnnnnnnnnnnnnnnnnnnnnnnnnnnnnnnnnnnnnnnnnnnnnnnnnnnnnnnnnnnnnnnnnnnnnnnnnnnnnnnnnnnnnnnnnnnnnnnnnnnnnnnnnnnnnnnnnnnnnnnnnnnnnnnnnnnnnnnnnnnnnnnnnnnnnnnnnnnnnnnnnnnnnnnnnnnnnnnnnnnnnnnnnnnnnnnnnnnnnnnnnnnnnnnnnnnnnnnnnnnnnnnnnnnnnnnnnnnnnnnnnnnnnnnnnnnnnnnnnnnnnnnnnnnnnnnnnnnnnnnnnnnnnnnnnnnnnnnnnnnnnnnnnnnnnnnnnnnnnnnnnnnnnnnnnnnnnnnnnnnnnnnnnnnnnnnnnnnnnnnnnnnnnnnnnnnnnnnnnnnnnnnnnnnnnnnnnnnnnnnnnnnnnnnnnnnnnnnnnnnnnnnnnnnnnnnnnnnnnnnnnnnnnnnnnnnnnnnnnnnnnnnnnnnnnnnnnnnnnnnnnnnnnnnnnnnnnnnnnnnnnnnnnnnnnnnnnnnnnnnnnnnnnnnnnnnnnnnnnnnnnnnnnnnnnnnnnnnnnnnnnnnnnnnnnnnnnnnnnnnnnnnnnnnnnnnnnnnnnnnnnnnnnnnnnnnnnnnnnnnnnnnnnnnnnnnnnnnnnnnnnnnnnnnnnnnnnnnnnnnnnnnnnnnnnnnnnnnnnnnnnnnnnnnnnnnnnnnnnnnnnnnnnnnnnnnnnnnnnnnnnnnnnnnnnnnnnnnnnnnnnnnnnnnnnnnnnnnnnnnnnnnnnnnnnnnnnnnnnnnnnnnnnnnnnnnnnnnnnnnnnnnnnnnnnnnnnnnnnnnnnnnnnnnnnnnnnnnnnnnnnnnnnnnnnnnnnnnnnnnnnnnnnnnnnnnnnnnnnnnnnnnnnnnnnnnnnnnnnnnnnnnnnnnnnnnnnnnnnnnnnnnnnnnnnnnnnnnnnnnnnnnnnnnnnnnnnnnnnnnnnnnnnnnnnnnnnnnnnnnnnnnnnnnnnnnnnnnnnnnnnnnnnnnnnnnnnnnnnnnnnnnnnnnnnnnnnnnnnnnnnnnnnnnnnnnnnnnnnnnnnnnnnnnnnnnnnnnnnnnnnnnnnnnnnnnnnnnnnnnnnnnnnnnnnnnnnnnnnnnnnnnnnnnnnnnnnnnnnnnnnnnnnnnnnnnnnnnnnnnnnnnnnnnnnnnnnnnnnnnnnnnnnnnnnnnnnnnnnnnnnnnnnnnnnnnnnnnnnnnnnnnnnnnnnnnnnnnnnnnnnnnnnnnnnnnnnnnnnnnnnnnnnnnnnnnnnnnnnnnnnnnnnnnnnnnnnnnnnnnnnnnnnnnnnnnnnnnnnnnnnnnnnnnnnnnnnnnnnnnnnnnnnnnnnnnnnnnnnnnnnnnnnnnnnnnnnnnnnnnnnnnnnnnnnnnnnnnnnnnnnnnnnnnnnnnnnnnnnnnnnnnnnnnnnnnnnnnnnnnnnnnnnnnnnnnnnnnnnnnnnnnnnnnnnnnnnnnnnnnnnnnnnnnnnnnnnnnnnnnnnnnnnnnnnnnnnnnnnnnnnnnnnnnnnnnnnnnnnnnnnnnnnnnnnnnnnnnnnnnnnnnnnnnnnnnnnnnnnnnnnnnnnnnnnnnnnnnnnnnnnnnnnnnnnnnnnnnnnnnnnnnnnnnnnnnnnnnnnnnnnnnnnnnnnnnnnnnnnnnnnnnnnnnnnnnnnnnnnnnnnnnnnnnnnnnnnnnnnnnnnnnnnnnnnnnnnnnnnnnnnnnnnnnnnnnnnnnnnnnnnnnnnnnnnnnnnnnnnnnnnnnnnnnnnnnnnnnnnnnnnnnnnnnnnnnnnnnnnnnnnnnnnnnnnnnnnnnnnnnnnnnnnnnnnnnnnnnnnnnnnnnnnnnnnnnnnnnnnnnnnnnnnnnnnnnnnnnnnnnnnnnnnnnnnnnnnnnnnnnnnnnnnnnnnnnnnnnnnnnnnnnnnnnnnnnnnnnnnnnnnnnnnnnnnnnnnnnnnnnnnnnnnnnnnnnnnnnnnnnnnnnnnnnnnnnnnnnnnnnnnnnnnnnnnnnnnnnnnnnnnnnnnnnnnnnnnnnnnnnnnnnnnnnnnnnnnnnnnnnnnnnnnnnnnnnnnnnnnnnnnnnnnnnnnnnnnnnnnnnnnnnnnnnnnnnnnnnnnnnnnnnnnnnnnnnnnnnnnnnnnnnnnnnnnnnnnnnnnnnnnnnnnnnnnnnnnnnnnnnnnnnnnnnnnnnnnnnnnnnnnnnnnnnnnnnnnnnnnnnnnnnnnnnnnnnnnnnnnnnnnnnnnnnnnnnnnnnnnnnnnnnnnnnnnnnnnnnnnnnnnnnnnnnnnnnnnnnnnnnnnnnnnnnnnnnnnnnnnnnnnnnnnnnnnnnnnnnnnnnnnnnnnnnnnnnnnnnnnnnnnnnnnnnnnnnnnnnnnnnnnnnnnnnnnnnnnnnnnnnnnnnnnnnnnnnnnnnnnnnnnnnnnnnnnnnnnnnnnnnnnnnnnnnnnnnnnnnnnnnnnnnnnnnnnnnnnnnnnnnnnnnnnnnnnnnnnnnnnnnnnnnnnnnnnnnnnnnnnnnnnnnnnnnnnnnnnnnnnnnnnnnnnnnnnnnnnnnnnnnnnnnnnnnnnnnnnnnnnnnnnnnnnnnnnnnnnnnnnnnnnnnnnnnnnnnnnnnnnnnnnnnnnnnnnnnnnnnnnnnnnnnnnnnnnnnnnnnnnnnnnnnnnnnnnnnnnnnnnnnnnnnnnnnnnnnnnnnnnnnnnnnnnnnnnnnnnnnnnnnnnnnnnnnnnnnnnnnnnnnnnnnnnnnnnnnnnnnnnnnnnnnnnnnnnnnnnnnnnnnnnnnnnnnnnnnnnnnnnnnnnnnnnnnnnnnnnnnnnnnnnnnnnnnnnnnnnnnnnnnnnnnnnnnnnnnnnnnnnnnnnnnnnnnnnnnnnnnnnnnnnnnnnnnnnnnnnnnnnnnnnnnnnnnnnnnnnnnnnnnnnnnnnnnnnnnnnnnnnnnnnnnnnnnnnnnnnnnnnnnnnnnnnnnnnnnnnnnnnnnnnnnnnnnnnnnnnnnnnnnnnnnnnnnnnnnnnnnnnnnnnnnnnnnnnnnnnnnnnnnnnnnnnnnnnnnnnnnnnnnnnnnnnnnnnnnnnnnnnnnnnnnnnnnnnnnnnnnnnnnnnnnnnnnnnnnnnnnnnnnnnnnnnnnnnnnnnnnnnnnnnnnnnnnnnnnnnnnnnnnnnnnnnnnnnnnnnnnnnnnnnnnnnnnnnnnnnnnnnnnnnnnnnnnnnnnnnnnnnnnnnnnnnnnnnnnnnnnnnnnnnnnnnnnnnnnnnnnnnnnnnnnnnnnnnnnnnnnnnnnnnnnnnnnnnnnnnnnnnnnnnnnnnnnnnnnnnnnnnnnnnnnnnnnnnnnnnnnnnnnnnnnnnnnnnnnnnnnnnnnnnnnnnnnnnnnnnnnnnnnnnnnnnnnnnnnnnnnnnnnnnnnnnnnnnnnnnnnnnnnnnnnnnnnnnnnnnnnnnnnnnnnnnnnnnnnnnnnnnnnnnnnnnnnnnnnnnnnnnnnnnnnnnnnnnnnnnnnnnnnnnnnnnnnnnnnnnnnnnnnnnnnnnnnnnnnnnnnnnnnnnnnnnnnnnnnnnnnnnnnnnnnnnnnnnnnnnnnnnnnnnnnnnnnnnnnnnnnnnnnnnnnnnnnnnnnnnnnnnnnnnnnnnnnnnnnnnnnnnnnnnnnnnnnnnnnnnnnnnnnnnnnnnnnnnnnnnnnnnnnnnnnnnnnnnnnnnnnnnnnnnnnnnnnnnnnnnnnnnnnnnnnnnnnnnnnnnnnnnnnnnnnnnnnnnnnnnnnnnnnnnnnnnnnnnnnnnnnnnnnnnnnnnnnnnnnnnnnnnnnnnnnnnnnnnnnnnnnnnnnnnnnnnnnnnnnnnnnnnnnnnnnnnnnnnnnnnnnnnnnnnnnnnnnnnnnnnnnnnnnnnnnnnnnnnnnnnnnnnnnnnnnnnnnnnnnnnnnnnnnnnnnnnnnnnnnnnnnnnnnnnnnnnnnnnnnnnnnnnnnnnnnnnnnnnnnnnnnnnnnnnnnnnnnnnnnnnnnnnnnnnnnnnnnnnnnnnnnnnnnnnnnnnnnnnnnnnnnnnnnnnnnnnnnnnnnnnnnnnnnnnnnnnnnnnnnnnnnnnnnnnnnnnnnnnnnnnnnnnnnnnnnnnnnnnnnnnnnnnnnnnnnnnnnnnnnnnnnnnnnnnnnnnnnnnnnnnnnnnnnnnnnnnnnnnnnnnnnnnnnnnnnnnnnnnnnnnnnnnnnnnnnnnnnnnnnnnnnnnnnnnnnnnnnnnnnnnnnnnnnnnnnnnnnnnnnnnnnnnnnnnnnnnnnnnnnnnnnnnnnnnnnnnnnnnnnnnnnnnnnnnnnnnnnnnnnnnnnnnnnnnnnnnnnnnnnnnnnnnnnnnnnnnnnnnnnnnnnnnnnnnnnnnnnnnnnnnnnnnnnnnnnnnnnnnnnnnnnnnnnnnnnnnnnnnnnnnnnnnnnnnnnnnnnnnnnnnnnnnnnnnnnnnnnnnnnnnnnnnnnnnnnnnnnnnnnnnnnnnnnnnnnnnnnnnnnnnnnnnnnnnnnnnnnnnnnnnnnnnnnnnnnnnnnnnnnnnnnnnnnnnnnnnnnnnnnnnnnnnnnnnnnnnnnnnnnnnnnnnnnnnnnnnnnnnnnnnnnnnnnnnnnnnnnnnnnnnnnnnnnnnnnnnnnnnnnnnnnnnnnnnnnnnnnnnnnnnnnnnnnnnnnnnnnnnnnnnnnnnnnnnnnnnnnnnnnnnnnnnnnnnnnnnnnnnnnnnnnnnnnnnnnnnnnnnnnnnnnnnnnnnnnnnnnnnnnnnnnnnnnnnnnnnnnnnnnnnnnnnnnnnnnnnnnnnnnnnnnnnnnnnnnnnnnnnnnnnnnnnnnnnnnnnnnnnnnnnnnnnnnnnnnnnnnnnnnnnnnnnnnnnnnnnnnnnnnnnnnnnnnnnnnnnnnnnnnnnnnnnnnnnnnnnnnnnnnnnnnnnnnnnnnnnnnnnnnnnnnnnnnnnnnnnnnnnnnnnnnnnnnnnnnnnnnnnnnnnnnnnnnnnnnnnnnnnnnnnnnnnnnnnnnnnnnnnnnnnnnnnnnnnnnnnnnnnnnnnnnnnnnnnnnnnnnnnnnnnnnnnnnnnnnnnnnnnnnnnnnnnnnnnnnnnnnnnnnnnnnnnnnnnnnnnnnnnnnnnnnnnnnnnnnnnnnnnnnnnnnnnnnnnnnnnnnnnnnnnnnnnnnnnnnnnnnnnnnnnnnnnnnnnnnnnnnnnnnnnnnnnnnnnnnnnnnnnnnnnnnnnnnnnnnnnnnnnnnnnnnnnnnnnnnnnnnnnnnnnnnnnnnnnnnnnnnnnnnnnnnnnnnnnnnnnnnnnnnnnnnnnnnnnnnnnnnnnnnnnnnnnnnnnnnnnnnnnnnnnnnnnnnnnnnnnnnnnnnnnnnnnnnnnnnnnnnnnnnnnnnnnnnnnnnnnnnnnnnnnnnnnnnnnnnnnnnnnnnnnnnnnnnnnnnnnnnnnnnnnnnnnnnnnnnnnnnnnnnnnnnnnnnnnnnnnnnnnnnnnnnnnnnnnnnnnnnnnnnnnnnnnnnnnnnnnnnnnnnnnnnnnnnnnnnnnnnnnnnnnnnnnnnnnnnnnnnnnnnnnnnnnnnnnnnnnnnnnnnnnnnnnnnnnnnnnnnnnnnnnnnnnnnnnnnnnnnnnnnnnnnnnnnnnnnnnnnnnnnnnnnnnnnnnnnnnnnnnnnnnnnnnnnnnnnnnnnnnnnnnnnnnnnnnnnnnnnnnnnnnnnnnnnnnnnnnnnnnnnnnnnnnnnnnnnnnnnnnnnnnnnnnnnnnnnnnnnnnnnnnnnnnnnnnnnnnnnnnnnnnnnnnnnnnnnnnnnnnnnnnnnnnnnnnnnnnnnnnnnnnnnnnnnnnnnnnnnnnnnnnnnnnnnnnnnnnnnnnnnnnnnnnnnnnnnnnnnnnnnnnnnnnnnnnnnnnnnnnnnnnnnnnnnnnnnnnnnnnnnnnnnnnnnnnnnnnnnnnnnnnnnnnnnnnnnnnnnnnnnnnnnnnnnnnnnnnnnnnnnnnnnnnnnnnnnnnnnnnnnnnnnnnnnnnnnnnnnnnnnnnnnnnnnnnnnnnnnnnnnnnnnnnnnnnnnnnnnnnnnnnnnnnnnnnnnnnnnnnnnnnnnnnnnnnnnnnnnnnnnnnnnnnnnnnnnnnnnnnnnnnnnnnnnnnnnnnnnnnnnnnnnnnnnnnnnnnnnnnnnnnnnnnnnnnnnnnnnnnnnnnnnnnnnnnnnnnnnnnnnnnnnnnnnnnnnnnnnnnnnnnnnnnnnnnnnnnnnnnnnnnnnnnnnnnnnnnnnnnnnnnnnnnnnnnnnnnnnnnnnnnnnnnnnnnnnnnnnnnnnnnnnnnnnnnnnnnnnnnnnnnnnnnnnnnnnnnnnnnnnnnnnnnnnnnnnnnnnnnnnnnnnnnnnnnnnnnnnnnnnnnnnnnnnnnnnnnnnnnnnnnnnnnnnnnnnnnnnnnnnnnnnnnnnnnnnnnnnnnnnnnnnnnnnnnnnnnnnnnnnnnnnnnnnnnnnnnnnnnnnnnnnnnnnnnnnnnnnnnnnnnnnnnnnnnnnnnnnnnnnnnnnnnnnnnnnnnnnnnnnnnnnnnnnnnnnnnnnnnnnnnnnnnnnnnnnnnnnnnnnnnnnnnnnnnnnnnnnnnnnnnnnnnnnnnnnnnnnnnnnnnnnnnnnnnnnnnnnnnnnnnnnnnnnnnnnnnnnnnnnnnnnnnnnnnnnnnnnnnnnnnnnnnnnnnnnnnnnnnnnnnnnnnnnnnnnnnnnnnnnnnnnnnnnnnnnnnnnnnnnnnnnnnnnnnnnnnnnnnnnnnnnnnnnnnnnnnnnnnnnnnnnnnnnnnnnnnnnnnnnnnnnnnnnnnnnnnnnnnnnnnnnnnnnnnnnnnnnnnnnnnnnnnnnnnnnnnnnnnnnnnnnnnnnnnnnnnnnnnnnnnnnnnnnnnnnnnnnnnnnnnnnnnnnnnnnnnnnnnnnnnnnnnnnnnnnnnnnnnnnnnnnnnnnnnnnnnnnnnnnnnnnnnnnnnnnnnnnnnnnnnnnnnnnnnnnnnnnnnnnnnnnnnnnnnnnnnnnnnnnnnnnnnnnnnnnnnnnnnnnnnnnnnnnnnnnnnnnnnnnnnnnnnnnnnnnnnnnnnnnnnnnnnnnnnnnnnnnnnnnnnnnnnnnnnnnnnnnnnnnnnnnnnnnnnnnnnnnnnnnnnnnnnnnnnnnnnnnnnnnnnnnnnnnnnnnnnnnnnnnnnnnnnnnnnnnnnnnnnnnnnnnnnnnnnnnnnnnnnnnnnnnnnnnnnnnnnnnnnnnnnnnnnnnnnnnnnnnnnnnnnnnnnnnnnnnnnnnnnnnnnnnnnnnnnnnnnnnnnnnnnnnnnnnnnnnnnnnnnnnnnnnnnnnnnnnnnnnnnnnnnnnnnnnnnnnnnnnnnnnnnnnnnnnnnnnnnnnnnnnnnnnnnnnnnnnnnnnnnnnnnnnnnnnnnnnnnnnnnnnnnnnnnnnnnnnnnnnnnnnnnnnnnnnnnnnnnnnnnnnnnnnnnnnnnnnnnnnnnnnnnnnnnnnnnnnnnnnnnnnnnnnnnnnnnnnnnnnnnnnnnnnnnnnnnnnnnnnnnnnnnnnnnnnnnnnnnnnnnnnnnnnnnnnnnnnnnnnnnnnnnnnnnnnnnnnnnnnnnnnnnnnnnnnnnnnnnnnnnnnnnnnnnnnnnnnnnnnnnnnnnnnnnnnnnnnnnnnnnnnnnnnnnnnnnnnnnnnnnnnnnnnnnnnnnnnnnnnnnnnnnnnnnnnnnnnnnnnnnnnnnnnnnnnnnnnnnnnnnnnnnnnnnnnnnnnnnnnnnnnnnnnnnnnnnnnnnnnnnnnnnnnnnnnnnnnnnnnnnnnnnnnnnnnnnnnnnnnnnnnnnnnnnnnnnnnnnnnnnnnnnnnnnnnnnnnnnnnnnnnnnnnnnnnnnnnnnnnnnnnnnnnnnnnnnnnnnnnnnnnnnnnnnnnnnnnnnnnnnnnnnnnnnnnnnnnnnnnnnnnnnnnnnnnnnnnnnnnnnnnnnnnnnnnnnnnnnnnnnnnnnnnnnnnnnnnnnnnnnnnnnnnnnnnnnnnnnnnnnnnnnnnnnnnnnnnnnnnnnnnnnnnnnnnnnnnnnnnnnnnnnnnnnnnnnnnnnnnnnnnnnnnnnnnnnnnnnnnnnnnnnnnnnnnnnnnnnnnnnnnnnnnnnnnnnnnnnnnnnnnnnnnnnnnnnnnnnnnnnnnnnnnnnnnnnnnnnnnnnnnnnnnnnnnnnnnnnnnnnnnnnnnnnnnnnnnnnnnnnnnnnnnnnnnnnnnnnnnnnnnnnnnnnnnnnnnnnnnnnnnnnnnnnnnnnnnnnnnnnnnnnnnnnnnnnnnnnnnnnnnnnnnnnnnnnnnnnnnnnnnnnnnnnnnnnnnnnnnnnnnnnnnnnnnnnnnnnnnnnnnnnnnnnnnnnnnnnnnnnnnnnnnnnnnnnnnnnnnnnnnnnnnnnnnnnnnnnnnnnnnnnnnnnnnnnnnnnnnnnnnnnnnnnnnnnnnnnnnnnnnnnnnnnnnnnnnnnnnnnnnnnnnnnnnnnnnnnnnnnnnnnnnnnnnnnnnnnnnnnnnnnnnnnnnnnnnnnnnnnnnnnnnnnnnnnnnnnnnnnnnnnnnnnnnnnnnnnnnnnnnnnnnnnnnnnnnnnnnnnnnnnnnnnnnnnnnnnnnnnnnnnnnnnnnnnnnnnnnnnnnnnnnnnnnnnnnnnnnnnnnnnnnnnnnnnnnnnnnnnnnnnnnnnnnnnnnnnnnnnnnnnnnnnnnnnnnnnnnnnnnnnnnnnnnnnnnnnnnnnnnnnnnnnnnnnnnnnnnnnnnnnnnnnnnnnnnnnnnnnnnnnnnnnnnnnnnnnnnnnnnnnnnnnnnnnnnnnnnnnnnnnnnnnnnnnnnnnnnnnnnnnnnnnnnnnnnnnnnnnnnnnnnnnnnnnnnnnnnnnnnnnnnnnnnnnnnnnnnnnnnnnnnnnnnnnnnnnnnnnnnnnnnnnnnnnnnnnnnnnnnnnnnnnnnnnnnnnnnnnnnnnnnnnnnnnnnnnnnnnnnnnnnnnnnnnnnnnnnnnnnnntttcttaggagaagcagctattagttctctaatatactactacgtatactactgtctctatttcctgatcctccattatatacagcattcccttaggcattctatacctaggggtcttacagtgatcctatacgggctctggcctattacagtactaagtcctttatatacttagattttgtcacggataactttgtgcgctactatatatattggtcctgggcatgtcagagcgagagctctgacataatggtcttttggctgagcggaagaatgtgcgcccaggcatatcctttacagatttaaacccttatatatactcttaattatatataataactaatagactattaatctattaataaaggaaggagtattaatatatataaagctttactatatagatattaatagatattagttaaaataagaagttaatattagataggttaatatagattagattctaactaatagaaatacctactaatagtctaataaaagctttaccctattagaaataagaatagtttagggaattacttagaatatctaagattaattatctaattagttataannnnnnnnnnnnnnnnnnnnnnnnnnnnnnnnnnnnnnnnnnnnnnnnnnnnnnnnnnnnnnnnnnnnnnnnnnnnnnnnnnnnnnnnnnnnnnnnnnnnnnnnnnnnnnnnnnnnnnnnnnnnnnnnnnnnnnnnnnnnnnnnnnnnnnnnnnnnnnnnnnnnnnnnnnnnnnnnnnnnnnnnnnnnnnnnnnnnnnnnnnnnnnnnnnnnnnnnnnnnnnnnnnnnnnnnnnnnnnnnnnnnnnnnnnnnnnnnnnnnnnnnnnnnnnnnnnnnnnnnnnnnnnnnnnnnnnnnnnnnnnnnnnnnnnnnnnnnnnnnnnnnnnnnnnnnnnnnnnnnnnnnnnnnnnnnnnnnnnnnnnnnnnnnnnnnnnnnnnnnnnnnnnnnnnnnnnnnnnnnnnnnnnnnnnnnnnnnnnnnnnnnnnnnnnnnnnnaaatagatatataataatatagatattccttcctaagcctatataggcttatatatattttcctcttatatagaccattatctgttatatactagtaatatattatttagtaataataaagactagaaaagtttagaaggatatatttataaactttatagtaatctaattaattaaaaagtatttaaataaaagatagttactactttaactactaaaactaagcttctagtacttactaaagctagaaaaatagtctaatagtaatactaagtcctttatatacttagatttaaacccttatatatactcttaattatatataataactaatagactattaatttattaataaaggaaagagtattaatatatataaagctttactatatagatattaatagatactagttaaaataagaagttaatattagataggttaatatagattagattctaattatagaaatacctactaatagtctaataaaagctttaccttactaaaaataagaatagtttaaggaattacttagaatatctaagattagttatctaattagttataaaagtagatattaaagaaaattttattaattaaagatagctcttaaagctctaaattataattactttaaaagctagggggtatattagaatctaggataaatactattattttttatccttaatatagttaggttatataactaactaggctagttttctatagaaaaactaacttagatggttttctgcctaaaaaaccagtcctacagtttttcgcccaaaaaacatcctttcattttattttatttatttgattactaagatatctattagattatcatattttagtacaactaccatttgtgccggcgccgccggattcggccgccccctcgatcgggtttggcgtccgtcccgtttgggtttggtctatcccaattcggcttggcgtctacgcttttcccaaattggcagaagcacagcccgctcctgttctggttaagtagctccagaagtagtttggcgcccgggctatccctaaactggtatctgccattcccgaccgcctaccagccttatccttgaactatataacttccagtgcgtcgcttgatcatcctcctctctctgactgactacaccatttcctcccccgtcattcctagccgtgaaatgataccgtaattccggatcgtacggtattcttccccctgtgcctccctgtttcagctgggttcctcgttatcgcctgtgcccctttctccactcgactcgctatagatagatctatctattggccctagtcgccctaatccttaaattagaccgctgcactgcaaccctataatttgaatttagacgacatcttatatacttaccctttagtccctgtttcttcgttgtatccgctataacggtatagccttttataatcggcctagggagagagccttaacttgcgaagagattcgatttatgacctagccggttgagcacaattgtgacgcggcgctctctgagctagtgctaatcacaatatctcgctatacctatgtatctattggcacttactactcttacgccccacctataacgaagaatatctcagtcctagattcttttttgtaaaggcttcgacttttggtagccgtgaataggctaacgtcactgagtggataacctagacgccagtatctacgccgagtaatcttctgtagacgaccttagcacaatttacttttctagcgaggcgtagtaaagaagactgaggaatctagactatcggaggttcctaggatggtcggtatcactgtacgcatgataatatcttacccgactggacgctgatacctatactaaacaccctttcggagacgattccttcactataatcctcttctagtaaggtgtaatagggtagactgtaaacttatctaagtataaaacactttaatctaataggagaaatgctatatacagtgtcggccttacgtatgactccttgtgaattccgttatagataggttggtggatcctcgtattagcaggctgcgctttatcttacgactcttctccattcgacctgcctaaagcgctcggaagaggtaagggaaagtaggtaggtataaagggttgttagaaatccttactaggaccgagaaggaggttgactatctatttataattctttctcttctattctgatatattgcgtctatatctttcttatagtatagtaccgatcaatctagacaatatgatctattatcgtctgcctactaaaaaaccatattttaacctattctaggcactcggttcctacgattgtatccatttacagatacctttagatagacctacgccggcctatctatttctatctagctagtacaggtattcgagtcttctattcttagggtatacgctataccttcaaagtcatttctatatacctagtgaagtcgagataatattagcccctaataagtttacagaagaagtaactattaatagctcgaatgagtttaatatagatttcttaaatatatcttcgggaagagatacaaacgttactatatcaaatatatatacagtaagtcgagaattaccggataatatttccagtagtgatttaaggtaaggttctaattagtattataatggtacgtggtggctattattttgactccccttagtttcttcaattcactctattaaacttattataccctatctctctttccttactaataaagtagtcgataattgagggcttacttaatactttaagaccagacttctaaggtaataagcattataagagcaatatgatatcttcttcctaagatattatctaggggggaggtcttaagcaatctatacctttatactctatatcggtcggtaatagcctctgtatcctagtagcagaggaagaatttctaagttaaacgaaaatatataaaaatacaggtcagtggtctctcagttagctaggttacccagtcctctagcttacgtagtagaatatagacgaagctataatagagggagacattttactacattcgaacctgataatagatatagtagacagtaataaaatagttaatagctaagttcttgaccctacgggctaggaaaagtaatctactctaacagatttattacctagagatactagaattaaagtagacgaattaggatcgaaaccggcagcttatgtcattgggaaaagcatgccagccaagaagtataacagatatcctatttccgaaagctatatggttattagccaagagaaagacagggctgcagtttataataacaaaggcgagctacagcgttgtgatacagagagcctgttagtatctccaaaatttcgttaaaatggaacattagcgcgttcaatcttacctatattctaagacagtaaaaagcagtcgctatatagcctaacagaggaagttataggattttatccagtattagattaggctccagttttagaccagctttcggttattatccctaactgccgttcctaagagcgaggaacgaataactctatcttaataatacgaatagcctctttaaacaggaagcgggactaggataagtatatatctgataacagtagcgatgaccctcatggccccgacgatacagactatgtaggcgaaagtggtaaagacgtatatagaaatagcattcctttctatcgactaaaaagagtaaggcgacctaccgtacagcttaagcctagacctccccggcagaacactaaacgtctcttagtcgacgaggcagttcaatttaaagtagccgtagatcagtcttccccaataagcttatataatatcgaaacgattcctatccgaggtttccttacgcgatagatacttttattaagggtcatctattcagttacctttaaagagtaggtagagtattcctactcttagagatcaggtagagctacttcacactataaaaacaaaattggcagccagcattctaagcaaccccctcagaaagggtcctgcgctaggaaaacgaccgggccaacccgattcctatctaaggacgaccaacttttgattgaattgaaggaagagcagagcctgccatagaagcgaatcgcacagtattttcctagaaggtcggtaggctccctctaggtacactattccacacgacttaagggccataaggctagaaattctaggtattctgggcagagttctaacgtaaggagcgaatctttatatagaggcgcaccttgcgaggtagtttaagccgcgggtagcaagagtaaaggcaccgaagaaggtatgttaagaccgcgatacggtctacctcggcgcaggcaaacggtagaccgctattccccggtttgagttggcagtagttattagactttatcgaatatcagtcaaacggatcgccaaaaataagaccgtcccgctgggtctagcgcccgtagtgcattgggcaacagttgaatcttaccaggtttcacagtttcgaagagcggcaatggtctctccgcagagtcgctaagccgctctggcaatgaaacgcagttttaatctcactttttgctattggcgacactgctttcgactgtaatgtgagtcttacaaacggcggacctgtgaattactagatccggttagttttgccttttagggtttagagccccaatacgctgtcacgtaacctaccttcaacgccgctgacttaaaagaaaaggtggcgccgtttcccgacatcccacatatagacgggttgttccagctgctgcccaactttgcagaccgccgtcggactcagcgtcggatgtgttagtgctctgtcactccagagagagattttgtaattcaccgccatccaggaattgacggccttcccttggttacttttggccttgggctgtagttacctacgaatgacaggcttgagcaatatttctccaaaattgaccaatagatattagcgtctttaagttcaagccggaacaaggcaccccgtgaggtgtgataataacggcaccttagcgaatcaattaggtatgaagcggtgttgaagcgaagggagtgaaacccgcgagggtcctccactatgagttcttgcagaaagggagtggaccagatgtgtagactagacttgtgacattcaaactagatttctggcgtgaatacaaaggtattgccccatgtagcaaattggggttggtgagcagatttgtctagagagcccatcatgcaatcactcagcccaagaacctccaaggtttcttttacggactaaattcaacgctcggagtctgagtatggacctcggcgcaagtttatttcccatcggggcattgcaagaaaccgcccggcactgcaccctcatgggtcatcaagccacagtagtaggccaatgggtgaccatcaacaccttgcgccttgccattgtagtaaaatacgacgcgctcgtccccgtatttcttattgttcttgccaccgttgtaaggcccgttcttgacgagcggatactcctttcgattctggtcgtgctcggggcagtgagcagggaagtgcagctgcacattcttgctgttatcattatcgaacgggtgcgggtagttcttcgcgcctcgcgtctcaggagggtccagcatgcccaggttcacggcgtgctgcgtggcaaggtagatatcgtgtccgtcataagtgttcttgccgcacttgatggatgcagaggcgttgggaccatcccactaaaagagatatcagtcagaattggaaggtttcaatttaatggagtgatgacgtacgttaatgggtgcgttggaaggttccccacgctcttgaagatcagcaaagtcatcggccgaaagggccgaggcgaggctcaagaagaggatggaggcggttgccaatgtgaacttcattgttgcggttggacgattggagtagaaaaagattgctggaggattgaagttgaactgttgatgctaagatgaggtctgagtgcttgctgctggattttagagccggcaaaggctcttttatgccattgatggagtcacctaggcttcacctaggctgattgagagccttgcactagcagggacggacatacagaatctacctgttgaagcgtcgattggctcacagaggagctgatatcgcgcgacaattgggggcaattctacattgtgatgcaatgatttccttgtttggaggctttttagtaggactgttagtagtggaatccttcaaaccggtaaagttcgctttgcatacatgcgactagggcgagtgctccaaagcaagcttgaagcggaagacaatgactttgcctactctcactgtgacaagaaagtctccatttccctcgcaactgcgtatagaatagagcaattggagtgttgaagttccaatgctgatggagcttatcggtgtaagctactctaaagccctgtaaatcgtactgcatatagcatttgaccactctcgtctttcggaccctgcgcatggacatcgttcatttgtacacaaggctgggaggattctattgggggccgtcagccttgagaccaaaactggccccatcttccctagtggatataatgtccagtgacgtcaatccgcatgtccatccgcctgttgaactggtcgggtctcggcgtgacagatgctccgacagaatcatatcgtctttgcataccaggcttctcatcttttaggtaatatcgtctcgactcaagacgctattgatgcggttgactggatcaagctgcttggcggcgccaaagtctcttccctgaattgagcacgattttatgttgcgccttttcggccaagaaaaacagttgttccactcgacgaaatcagttgttgttgtatcgggcattttgctctaatcggtgcggcttaattgtcaaccccacgttcctggttgatcggcagattagtcatgatgggcagccttatgatgtcactgtacagggctattgttgcaacaggacggaggattacactgcgcctcgatcaatatcagggtagttgtgtgactctttggacttttgctgcctagttgccactcttgaaagtttccgatattgcgaccactccgcactttctttcctcgaacataacgcaactaacacatccttcgtctcagcagcgcagcgtagtgactgctcatctctcaaacactcaaagtcccaaaatttattccttcaagagccctcgcgctctgtcatcatgaacaccagcattcaagaaatgacgtgcaaatcgattgagctcgacggctttggctctgccgccgatgacgcttggttcgatcaacatactgcacccatggacggcgaggaagagaccggggtgcatccgtatcaagctgcggctctcaaagcgtacctcaaaggcgactccaagccatccgagacagctgccgccctgaccaagccacatgactccgagaagaagaccgacctgcgagaccgcatagtgggcatactcgaagacgcactttttgagctgcctgaaagccacacacccgctcttgtcgacctgctcaaagaacttagccaactgccagacgaagaggacggcgaacctgtctggaaaggtctcaaaagtttcggccactcatgggcagatggatggaagcagagccactggcgcaaagcgttggcaacgcgggatccagccacaagagcgaagaggcgtgaggctcacgtgcaccaggcctttgtggaggcgtcttgtgcaatggctgctccgggaccgaatgctgaagatggtcttttgccactaagctggggctatgagtgcatctccgaggcgctcgaatgccaggatgcactgtgggacttcgaagtacctgctgcggcggtgtggatcaaggtagctggagaaagactcagagagagcgcgaagaaaggtgagaagtcctgggcgttggagagagaggggaggctttggacggcggggccgatgagcatggatcggtggaaattctggttgcaaagactcgaggagattgagaagattggcaaggtcatctcgtcaacggcgagtgaaggtctgcgggatgctcgagcccagtctaaggagtagttgatgactatgcctaaacacttagcgttagagtagcagtctggattgttaatttgcttccagacggccttgatggcaaattgaacatgtgctaggcttgtgccctgagagtcgttgataaagtcggattccagctaacaggctagaagaccgattataagatcacacattgcccaccccatgactcccaagccattagccccttataaatcgaagatccgatcgaagttctctgcctaaacaatgttgaatgtcagaatagttcggcaagggtcatgcgatcgactgacatacgatatccaatctccggggccagatttgctatcggcgcggtacagatccggatcctgatgatagcagatcagaaggcgtataaggggactcgtaggggtttggaatcatccccgacgcacaacatcgatagtttggtcggccatgtccaaaggcacgctcgcagctgacagcggggaagcgtcaaggaggcttgaatggtgggaacataacgagatataaagacaggtacagacttccttggttggtgggtgatgccaaaatcacgggatggattcccgtcatccgcgtttgattctaggtttgggggaggggaacagagtttatctgtcctctctatcgcccacgaaagacgcttgatcaaatttggcagcttgctgggtggcatggacgacattttgtagtcgatttctgttataattttagcattattctcctgtgcatgacatggcgttgtttataacttacctttgcttcttcgttccatcatctgttgatcatcacactctgtggcatgacttttttcttccgttggtaaactttgttctgtacgtatccgtttgcgtcgcgccatattctcttgttcttccacgctgattgattgatctataattttgacaagttcttggaactgttcgcaaggttttaagggttcggccgacacttcagagtagagcggtgaaagtcgatgatcaaagcacgcccaagctcttcactccaatggacattgtctcgcctaaggtcttcatgtattatcctgagggctttgatttccttgttcaaatttgtgaatttaacgctgtaccccctccccccagatatcacgagtgatctgaaggtgtagacgtaacgttaactaacgcagtggtctatgggtctcggggccgtcataagcagacagcagtggagctagacaggagcttttttctactcttccccaccccaacgcgatgaccatgccgcatattgccagaggtgggttcaagagcccgagggcgctttaaccatttcacttcctctaggtcaatgacaaacaaacgaacacccaggtcatcccacagtatgttgcgccacttactgtcgccatggacaactccatgtgaccggagcacagtcagagctttatcgcgctctaggtgaaagaatctggaattctcatcgttaatgacatactgaagacgttttccagcccagctcagtatcatcatctacgccattaattcgccatggtaccaatatgagactcgtggcgtgaaagtcccaagacagacggggatctgatttccttgcaggctcctgaggtgacgataattgtttgcctctgctttaatgagatgctgcttgtccgccgtggtagccttgattatcacagtgtatccgtgcgatagaagagtcgctttgataaggtaacccgtccgaccacagacgtgaagttgctcaaacccgtgatttcggtttcgggaaagttgatggtgaagccggcgtgtgaactcctgcggtcccacggagtgtctttggccaccgtggagtttccagttggggcattctttatccaaaggatctcggttggccataccgcagatgcaggcaatagtgtaatatagtcgcgcggattgccctactttttaagaagtctgtttattgttccggccggcttgtatcctttcgctttccttagttaattaacaattgttacctcgaccgcggctcaacctactgcgcgccgctgctgcaatggatggcgaatgcgattcttcatcactgccgctaccttcggtcgacaaatgcttcggagtagacatgcctggttggcagcgagaacgggatcgtgtattgtgtgtcttcggctctggtttccagtgcgagggtcaataattggaggctcgcgggtctttacgaagcgtttcgggaatttttctcaaaacgtcctggtattcgacctcccaggtctttagtctatcgtgtgccgcatcatgccattcttgagatagatcttcggcggccagcgcttgaagggtaaatgcaagcacctgaccgatggcggtccggtagaggcgccaatcatcgtccgcctgcacgtcctgattcgggatacacaagaaatattgaacaactgtagggtcatcattcggaatatagagaaaaacaaaagcctcccccgtgcagatgatatagccgtattgaaccccactgtcgatcatatataagaatatctgagtaaccactgcggcaacgaggtaggtggcataaaactcaaacgtatcgccttcctggtcaatgacatcgcgagccagatccatttggtgtagacccgccaccaattcagggattgtcaccttatacggcgctttgaactccactgcatacaccggtttttatcgttcatcagccacaaggtacacgcagaactggtcggcgcgccgattgcgtcttcgtgtagtgccatccctcttctatccctgcgccactcctctccccattcctctgcctcttccatgcctagtgttcgccactcgttggggtgtccgcgtgccctgaaggttcatttgctccaggctcttctccaaagaggtttccgatgggtttgcgcggtcgtagaaggtaactcggccttggattccaaactcatatcgaaggggttcatcatctcgcaaagccataatggcctgtggcataaaactcaaacgtatcgccttcctggtcaatgacatcgcgagccagatccatttggtgtagacccgccaccaattcagggattgtcaccttatacggcgctttgaactccactgcatacaccggtttttatcgttcatcagccacaaggtacacgcagaactggtcggcgcgccgattgcgtcttcgtgtagtgccatccctcttctatccctgcgccactcctctccccattcctctgcctcttccatgcctagtgttcgccactcgttggggtgtccgcgtgccctgaaggttcatttgctccaggctcttctccaaagaggtttccgatgggtttgcgcggtcgtagaaggtaactcggccttggattccaaactcatatcgaaggggttcatcatctcgcaaagccttaatggccttttcgacaaagttatccaccgtgtctcgctcaaaattccgaagagacgcttccgaatagatcggcctgttctggacattcgtaaggacataatcaatttgggtatcagaagggaatagtgggcgcgaggtaaaggcaccggtgcggtcgaatttcctccagattttctcttggagttgggggaaatcaagccaagggacaacgcgcttggggtaaagtcggttgacggggtcagtcgcgtcgccctgggtcgtgagagtcgcatccgtctcaacccgaatcgcttgagacagagagttgtggcagcgatcgaggaggcggaatagtgtgttgggttcgagtcgccgttcagcctctccctggaggcgctctgcttcttctcgcgcctgtctctcttcctcttcacggcgctgtgcctcttctcgtgcctgtctctcctcctcaagctgacgtcgtagttcagcgattgtttcttccatcgcttgttgaaatcagtattcagcagataatcgaatgatgcaaatcgaagtctacatagtagggggttcgctgtctggcgcgggggagtggcccgtcagggcggaatgcgtccagatgttttaccagcttactcacccccttggctcgagtcgattcatgcctcaggcacaaaataccttagccttttgatatgctgacgttcaaagtcctttgttttctagaatatacgtcgattcggtggtctcggattacctagactggcctcgccagtaaatttataaatatagttctacttaaattcctcagcaagtacagtcaccgtggcgaggtcattatcttgactacatcactcgcgagaccccgttttccgttctttcctgttgcgaaggatatattgtgtgatctcgctgtgggtaaggcattcgacaaagctaataagcagcgaaaactcttctgatataaatggaataggtttacctctctcaatctccgtctgttctgcggaacacccttctgtatgctcttagttttgggattagacgtcacgcagtcaatcgccatatggacctcatcgaaagcaaagagacgtacctttcctgtctgggcacttgaatctctcgtcaggaataggctgtatgggcgagacaaactgagctgcctttactgacaaaacctgtaacggtcagttgctaaataatgctgggagagctgacgtctgacgaggtatttatatagattttgattgagtttccaggtttgggtgggcgttgatggcaaatctgatgggcacgatcaagcttcccagcagaaaaaggaatgtaaagtcgatggcatgattcttcggatcaaaaaatgactttgttcaccatcaattgaaccttgttggaacaccctcaggttaaagcagccgcactatatgtctcattttcaatacccttgcgtaagtgccgcagagttctgctctcacgataagctgatataaacagataagaaagtaaaatcaaaactggccgctactgggttgtccaagcttgaaaatttgtcgttttcattcttacccccccaaaaaacatcattctttcaagcatgattcgattgcgcatcttgcaagtcagaaaacaaatgtcgcatattgcaatattgtttaggcaaccgtttcaatttttttttaggtaatttatgttgagaagacggtctctatctatgcttgcaaatgacaagacactgcttctaagagtagtaaataccgtgcgtataatgcataacagatgtttgaaaagtaccccacaagtatacaggagtgtgtatgtgtgtatgtgtgtgtaattcatttaccctgacccctcgcaataaagcgatatgtaggctaccactactttttgtaaatatatgataatttatccactgagattgttctaaacttcctgaacgataaactttaagccttacctagtaaggcctatgattgtctccactttaaactatgaaaaggctagggtactccactaccccgggttatatatctctctatagagacgcgattgtagtaattgatatactagtgctaggaattgaacctaaaccctatagaataataagtgactaatttgttatcctataggttacctttagggtacttactactatactaccgctaccggcaccgctactaggaatatatatatatatatatatttcatttaccctaaccccttataataaaagtgatatatagactaccttaactatatatatccctatatatatatatagagtgatctacttcctagaaaggaacttagagccttattaaggcctcttatagcctagttaccgttcctattattaggctacccttatagtatacaactatgaaactgttataacgccttaataaagtctagtatagcctaggcctttttagcttataagatagtatctagtttaccttttttaccttattttaagcctcctagtagacttaatatactattaaacgcgttccctacttctctccttagatttctttataactctactagacttaggtagtctataagtatataggtaactatttcttatatactacaattatagcggttatccttactatagctaatcttcttatagtaggtagatagctaattgtagactatatacagctgcgttagtagatatacctagtccctaggtaggcttctatacagcttcctagtatatattaccagtagagtattattaatcttctgtagataactacctttattagatattctctatttatattcctactaggaggtaatatttctatagataaataccctcttccttataagtagtaggtagaaagggtaagatttacctaggctagctgtaagcttcgctatttagtctatagcgttattactgggattattataatatcctagtacctactaaaggtatagtacggttcctacagtctagaccttagtagcagcttagtagatcgtatggacgatcctttatcctaacttattccttatactcttaattacttataaggctaacttactatcgcagaggattattacagtcgcttatcggtcttctagtcttggttaccagtaggccatcttaaacatagtactgattatatagaagatacctattagctccgctatatataccgaccagcggtctatcggtctaacctagacctattaggatttgaccatctccatatcgtcattgaatgttaccaccgcagctcctgattgactatcgcgtcctgaggcgtccgaatagacgatgatatctgatattgagcggattgcctcggcctgttctatcgctgtctctcggtctgaaccgacttcgatctccacgaagggatcgagccatggcgaggctgtcttctcttgcggggaactatcgaaggctgaaactcctctaacgaaaaggggttggtcgtttcttgagtgtttgtgggtgtggcttcgagagcccccgcgggtgggtccgccatcggtttggggctagctcccgctcggtacacaatcacaacaattttatatagaagatgatatcaacaacgccttatctcgaagagtcaaacggtcttttgtcagcaatggtcgaaccggaccgctggcttctccgctaccaggatggatcgaaatcagtttcaccactttactctcgtgaatctttctcgtaccctatcccaaaacatgccaatcttgttcaggcctagcctatttccaaatgccgaatcgtattgaaaccgtctctcacgtgataagaggctctataaattacctgtaatatttttgcaaaccctactgactttattctttcgcatcaccttgcctggcagaaggcaatatcagaacaatcagaatttctgattcctgatcattctttttcggaccatatccagatgcagaatctggtccgaaactccctcggcgtaaagaggcatctcgtattgacgttgtgtcgaccggatctaccaaatatgtagctttttggcctggtttgccatcaaacgggttatcacgtgccatgtggtgattggcttaaaaggtgggactatgagtcacaaaagctcaaacacagtcaagagccccgccacctttctccgcacagacttcattcagtaaacaaacaatcacttgttcctgttgctcccaacactcatgtggaaaatcctaacaatcctggatcatgcttctgaaccgattttattgcacgcgctgcgcaatcagctttaaaactttcttcgcgaggctgcaacatatctacgactctccatatcatcatatctgctacatttgtttcccaccacaagatttcgcgaagatggttgagcttgatgagcacctcggaactgaacacaactactgtatttcctgcgacatccaatttgaaacagcccaaaatctagctcagcacgacataggagagcacaacatgtgtgtcacctgtcgacaattcttcggttctcgatcaagtttatccaatgttagtttgtatctaatttcccactacgcagcaggtaagattcttaaacattttatagcacatgaccacccacatttgaaagccatcttttagtatggaggatacatcaaacgtccaatgactattacacctcaggtggcaatatgtgcggagttgagtgtgcttgtatgttggttggccacgaatgcgagcgatgacgtaatggagactaaaaaaatgaacggtgaacctggtttcttcatccatcaatgtgggccgagaacagtagcttttacaattcttgctgaaccctcgtgataaacggtggctggatatgatacagcggggggcgaaactttatgatgttgaacgttattgtagttaaggaatcaagtaacaagtagctggacaggatcagtgcaagatggctcaagtcgtgatatggcgccgcgagtagaatacttccaatcatctcgatttgaatgatagcttattgtatccaaaacacattcatgcatttcggcaagtactgcgtaacactgaatgtatcagaggtgcaaggagccgagctcagaaaatatgccgggacaattgacactcccaaaatgataaagagctttgccaaaacgttttgcatgagtcaaagtacagattgagagtaataattccttataaggacactattcaccttagactaaatttcacttgttgataaccccgcccgcacagtattgatgatattacggacgttatcatcaccagagtcctggattgccctcaaaaagtcgttcaaaaatctttggtagtgacggagttctacttctattttacttgcgtgactcttgcgtcacttatcggagctcatatcgaacacgcaaatagagctacgcttcgtgcattctaagcatggattctcagaactgcactgtcgttgaaaaccaacaagtaagcatctaagtatacaatataatccaggatcctttaccttagtccgccggcgctgacattctttacaggctgctgagagtcttcgtattaggtggtctcgtaccgggggtttcccccgttaatcagatatcaagggtttagtagctggcgtataaggctggataggcttgaatcgtgaagtagacatctgtatcgtgcgcttggtatcaatgtagacgcggcgggggttaaaggtctgcgtaagagaggtggccaagcgtacatcacaagcagtaagaatggtggaggcccggggaaaaagaggagccaggcagacccattgctgactcagcattctagactcgcccgaataccttacggtctgatacaacagctattttaggctgttatttacagctgtacagaaataacgccaaggaaggggttcaaggacagcgtaactgcaataggtatagcgtgtttcaccagagagtttgagaaataatctcagtgagcaaatggtgaaactgatttcgattcaccctgtacaatgaattccataatcatttttacaccttggcacattcctccaacagctccctagcctaactcattcggattactgatggccaatccgatcgacccaacgtgagcatgatcctaggagcgacaaatgtagctccctaactcaatatatcgtagtttgattaaagaaacagctagctggatttagaccaaaataagaaatgtaaacgcaattaagtacagtagcgatagaaaattaagaggctgctcattatcgatagcgttataggccgattcaaagtgttcgagctctcgttataggagagtgagaaaacggataactttcaagaaatattactatagaaatcgggtgtattagatatatgatgaccgttatacacaacgacctcgaaaaaacgtttttacttatttaaggaaactattttatttaatcgattactacctcagtataaaagggaggtactgtttattagatttaattggcttatatatctctacttattttaatatctgtgtattccctaataccctaataccccctatatctactagcgagaatttcttaccctattcttataagattattctcagccgtttactaatacctaatattactatatacctatctttactatattactatggcaaatttttagtcatctactcgttagagaataggctagccaagatatcctatagactcttaagtctagttatatagtcgctcgtataaagcctaaagtagtgtaagtaaaatgtggtatctatatagactataggggtatatatatatattacgtgctttttactagattaccttatataatatatattatagtgtacgccccctagattatatagtatataagatagatagaaatataatctatatagaaccatataattaggttccctttaaacgtaaggaagctatattcctttacttccttgtataacgccttttatctaaagtcgactatagtatctcttaatattgattatttatctacaaaacttcccttaggaacagagtagtagtcctaaggatattctagtaatcctagggtagactgatattctaaaagatagagttagtgctcctaaaggcagagtcagtattcctagggatatactagtaatcctagggatatcctagtgatcctagggatagagttagtattcctagagatagactaatattcctagagatagagtcagtactcctagaggcagagtcggtattcctagggatagactaatactcctaggaatagaccagtcctcctaactaagttaagattatacacaaaatatatatactagaaaaaaggaaatacttgtagagttataatattaataagtaataaaatagaaggtagggtttatatatctttaataatagtaaaataagaattaataaaatactaaagaatagctaaaggtagtaagaatatactagtaaaattttaaggatagataaattagcttagaaatccgagtataaaagttttattaaatctttcctaaatttaaggggtactagttataaaatcatttaatataataaggatttatttttctaataaaaagataatagttattttatttatacctatagttaactaattcttctaatatttatatatatatatatcgtttagctctaaaataaaattctagtataactagaccttagcttaatatattattataatattattaactagctccttaaactttagagaagctaactagtttttagtatagtaggtattaatatagctatattaataaatttactagagatagttttaggttagtataggctataactctaaaaactatagtttctagagagtgatactagtttttaacgctttaaaactatagctatttaaaggttttcagaatccctaagaattacttaatctatatatttagttccctaatctctttagctattcttaatagtagtactttaaggaatctcttagtatagcttctatacctcctacctattctaatcgatcttactctattaaaaagttaatatactaaaaacgaggttattataaattaagcttaataaaaaaagtgtctaaatatagtaagatatataatatagatatctatataggtatataccttcgggaaaccggctaagtatttatcctattagcggatactttaggattttaggtattccttagcttataattagtatatctctaactatacctttaataaaaagataactaaccttttaagaattcctactatctatccctaatactagtaatagactagggtctagaggagcttaataaagatatactaaaataatatatataaagttatataactaaaggggaacttatactagactagaatatttgcaattaatatcttatatataatattttctatctataaattagaatagctattatattaatagattaggaattagtaaggccctaagggtaaagtataataacttatagttctaaagtagaatctctatactaaataaagagttcgcggtatattcttatataggttatttataactacttataggcctaaggataggggaaagtagatagcctatatagttagcctatagtatatataattcgagcgtagtatagataaagtgacttctagaggtatagtatagaaaaggctatatataaataaatgagaagttttcgtaaaggttagagaactattaactagttataaatcgataaggtatatacagcctagaaaatatggtagaaataggcttagtatagggcttatataagatatttctaacctaggtaaaattaattttttactctagacttaggggttacctaggtattaggaaaaatacactgatttagagtagagactactatctacctaataatatttaataaatactttagttatttaaaaggaaaagaattatttcatttttcctaagacaaccgattatttaattaacagccataagtttacttactattagcccttagttcttaccactataggccttattcttattcaattaagcagcttatccgaatatataatattcttatatattataatattatttatataactatataggtttctttaaactatatctatcagccttagaatttacgtatagttatctacttaggatctaagtctaggttaagtattatatactttaaataggatataaataaattggtttttttttctctctaagaactttctttctatcttatatttctaagtaacttataatttaataattagttataagtttacctactagttaagagggtatataaagtggtagttaaagtatagtagtaaactaagggccccttccctacctaaagtataagtctatatattttataatctatttatatccctagcttactaactaaaaattattttaacctacttactagtacctctgctctattctaagattttaggtaagaatagagaacttaaacttatttttcctaagttatactaatactataatctttactctatattctaactatcttaacttatagtagaattagacttactctaataaggtaactatattctaggctatatatagctatatataggtataagaaatatatatataattacttatatatattaagcctatagggttaagaatatattatattctagccctacttttatatatataaactagtattacttctattatacttataataatagggcttataaacctccctttatatatttagaaagtacctatttatatatagtacttaattacaatctctagatataatctaaatatctataaaatagctatatagtatctctttatagctcttttagaaacttataaatatagaagaccctcttattagactaaaaattcgttttatatattagtaaacctataaatacttatagcctaataaagtctttttattatatcttcttctagtatttaaagctatttaagtataagctagtatattatacctttaacctttaatagcgatagcctttagagctttcttaagtaaattaatatactagctttaagccctaagtcctaagctatattagttataattaaagaatttagctattagtataaataggtttttactagaaataaggagttaaggaaagcctaaaataagatctttaatctaaaggaaagaaagtaagttactattaaggagatatttatagctaataagagggaaaaggtaaagtaaaaagaagctcttagttaagttaatttactttatatattagttaaatagaaggactaatcttttactaaatactctaagtaagtataagagctctagtagtagatagataatcttaagttatcctacttattagagcttagtaaagtttcttaattagctaaagatattagtatactttaatagaatttaaaagagaaagataagattattaataaaataaaaactattagattaagtcttaaaataatgcttttattaatatagtagaaaatagaagagttaaaagctaagaaagctatactaaataaagaattataaataagctaaggctaactctaaaatatcgaaagctttactattctataattagagcttaataaaagctcgatataagttatatataggtatttagcgatatttatatactaatatattttacctagtttaataaactttttagatctttagatttttactctaaataagataactactatcttaaaggaggatcttatagaaaagatcttaaaggtatatatatatctagccctttctataacttatctacttatttatttatcctaaaagatatatttatctaagaaaggctttaaaaagagaatactaggttttcttagtaatatatccctataatacccttaaacttccctaaagctaaagggatatacctagctataaccttagctattcttttaaaggaaatttataaaaatatcttttagcctaattatattttacctaaagattctaaaatctatagaatccttagttaccttactaagaataatactaagaaggaaagtttttaccgatatattcttctcttacttagtcttaatactaaagagagtcttctctaaataagggtttagataatagtctataatatattattatatctatagaaaatactcttagaaacttagtataatttaatctatataaatatagagaggattatataaaaagtagctaacttttagcttttaatctaatatacttagtagagatataagatagagtttaatctaatggctaacttttagcttctagtctaatatacttagtagagatataagatagagtttaatctaattaatcttaaagataataattagaagccttttcccttcttaagagataatatagtcctaaattactaaaactaggttacttaagatataaatattctaactatatttctatatatcttactagtaaaagatagtaattataacctattaacttagataacctagttataaagtttatagaagctttatatagtagtagagtataaagctagttaaatattaactagcttagttattccttaaaggttattaacctactctagatagaagtctattacttataataataagtaactaaataatacctcttttttagataaaagatagctatagcctttataatttaattaggaaagtaatccttatacttatctatagagttttatcctactattattagtaattataaagtaagtaataaatagagattagggattttttacttatatatcttacttatacttattttattctaattatataatatttatttaatagctattactatattaactattaagtttattatagtagtagtagtagtatttatttatattaacccttataaagtaatatataagtttattataggtccctaaaaatatctttattattctagtaacctaatttagactaatagtactctaaataatagtataagagaagccgattatattatattaactagactttagcttaactaatttcctaaattaccttttatagtaccacttatttttaagtctataaataattattttagttacttactagtttatttaaggatatagagtaatagaggtttctaaaatctttctttaagtaattttatagcgaaaagctataatagtctaactttattattaactataaataagagggactaatataggatataataagctaaaagtagttagtatttctatatactctacttagagtttcttatttaaatataaataatctataaatatattattattagaatagtaaagacctatatctaatatagcttactttaatagactttattataaactaagtttattctaagtaatactaactataaaaaggctggtatagtataggaattaagctatattattagagatagtttttttataatatctataaagaacctaattaattatatatttaaactatacttatagtatatagtctcttatactttattagaagtataaggtatatattttagttaccctaatcccttataataaaagttaacttctaaagtagactaaaatataaatctatacttagcctagttagctatagtttagaatagtcttataagtataaaaaaaaaagtaaatatttaatctactaagttatagctaccctatcgaagtataactatagtatatactttattaatatattataatagctattattctttatatctaatctaacttagtagggccctagttaaattattttataacccttagtttatatatccctaatctctttctccttctcttttcctacttattttatagtatattctctaaaagtaaggataataattattatagttatctatagtagtagttttaaagtacttatatctaataactagtctatttaagagatagctcttaatagatataaagatttacttacctaataggtagaacctatttagactactagataggctatataatatcgattaggataatatatatctatccctcttataaaatatacccctccttatccctactatctattaatttattagtataacttagccttaggatatataaaagtcttatatttaagctaatataaagtatccttagtagtctaaattttagataccttttatactaactagtataactataatagctattaaatatatatacctttactctataataatagataatactagtaaatagtattttagaatatactaaactagatactagatataaataaaaaataagaattaggaactttagctttttatataactatactttatataagttagcaattagtataggaaatattatactttttaaggaatagtataaataatttctttaaatagttaaattacctaaagagtaataactaagaccttctatataagataccctttattctatctattaataagctcctactaaagataaatattaaagttacctctaggagttaatacctttataaggtttagtaccctagttactatagagtaatctaactaaagattttctttagggctaggtatactatagataatactatattctaaagaataccgaatcactctaataaataacctaagggtatctccttcttagactaaaataagggggtaaactataagaaagatattacctttagattaaagagtaataaaaatagacttattctatattatttctacctttagctataagttaaagaacctactaagtataatagctaatagcttatataatccacttaattagaatatagtttcctctatattagaagactataggttaatagtactattctatatatttttaggaatactaagtctatctactataagtagttagcttagctatagtctttctataaaattacccttactttccttagctatatattcttctaactatttaatatagaaggtatatctttcttcctagttctagactatctctactaaaaaagccctagattctaataagtagcttttatagaagcggttaaattcctttatataatataagagaattttattaatacctatattctatatcttaaacagttatttctaaaaaagatagtactactattaattagtaagactaagtctataatctacttcctatataaagtacttagtagcgattttcttagctattataaatttattaaaagagcctttagatattagtaaatcctttagattaaggagcttagtaccttttttaataatttcctaatatatagtcttattaaattaagactagatactattacttactaagaatatattctcctacttaattagctagattatattagggtattataacttaataatattatctataaaactctaaattaccttaacctttattattataattacctactttaaatagtatctatatcttttaagtagattattaagtttaatatagttaataaatatattcttaataatactttataatacttttctaccttaatagttatataagttagttaaaggtactatagttaggagtaagtttatcgctatattcgctttattagttaatagggaattagttagtatatctcctaaagatagtatagtattatttatcccttatactattactttaagagtagtcttatcttttaccttaactttattcttccttttctttttataagatagtatatctagccctatatattctactttacttcgttttttaggtataggaaggaactgataagagctatactttactttagaagctagactagctataagaataggaggaagaggtagtagatctattattcctacttactatcttatttagtagactatatatattaatagaaagttactctaatagtagtctaggggcttactaaagttagaaatactaagtatatattacctaataggcttattactatagttactaattttatatattactagtagttcctagattttctctactattaaagaccgaaagatttcctctatagttaattatatagtaggtataaactctaactaagagatattagggaaaggaaagatattaggctactactattttcggttatataggaactactaatctatattaggtaatataggtctagactatagctaatagaataaaatagaaagaaagggaataaatagtatatatcttataatataatatattatctcactactagtaatttatctatatactcttcctattatagtattactttagtaatagtatattatataggtttcttcggtatatcggtctcttttactttcttatactctttaggctaccgcttcctcttaactttctactttactagttctaatttaataaaaaccgcctctctctaaacttaagatagtaatatagctcgctttaaaaaagataactctctaatatatctataaaatacctcgactttctatatctctaggtatacttttatctactaaaggactagaagctaataacctaagctatattatatattatattattctaattaaatatagatctttataaaaatcttcttatcttattaaattacctaaatctcctatttatattatatcctaaagctacagctttctgagcctaagatactacccttagtataaaattaagggataatctatctaagtcgcttatatattaaattaaagatatacttataacagaggatatttaaatatactttatataagtagaaagttaaggtatctaatatatattatatatataaactagtgtaaacgagcctccttaatagaggtatataagaatacctacctcttagagctttaagcactaatcctatactatcgtagcctctaataataagactatagtccttaataagtggtatataagttagtattataggaataaaggcaggaactctgcagtattactaaatttaattcaggaaggaactactctgatttatattaagataagtactaaccgctttaggatactaattatacttaaaatatatggcctcaagaatttctagagctaggacctactagtagaaagctgattggactagttctttagctaagctctaatacacttttattaaggtataactcttctattcgaacaaatcgatagataactgcagctctcttaaattataaagatatttacctaagagcaaaagaaggacggaagcaggtagaagaacgtgagaagcaatcataagggagacaaaaagcagaagagtatactaatatacctcttttacagagcttttacagtaccactatagcgttcgctcctaccagttataagttctattactagataaattatatagctagatttattagttttacacctccctatcaattaactgtaatagtatagaagatagtgatttctattatctatcagtacttcagtataaaatatttttcaactattataagaataccgcggtactttatactcctataaacttcactagtagataactaagctttatacagtataccacgtttatttctcaggctcctatatcgctacttagaaccgtgattaccttactctagattaaggtatatatctcttatagtctaatttattgcagggtagcttatctttcttctatatagggcgaatttaattataagtaactatatacttcctaatttagcggctctttatagtcaagcttcaagcttcttcctactttacttataaagcttctaatgaaactgtggactagtctgatacttagctctatacagcctctaatatactttttagtatagtaagtaggagagtgaaaggaaaagtaacagctattctttatataaagtctataggcacaaatatactataagaaggactctaatagacctataagctctagtataagccttaggcgatatagatatctacttatatctactgataatatagttatattatatagtaagttattaagttaggttattaaagataagttattaagaaaggaggggtctagggctatataactagattatattaatattaagtctatatattttgttttacttatattataaaaacagttaactagctaaagtggtcttaatctagcgcctatacagcttttagtctcttataactactaagaatcaagaatttcagttataatagaccgctgcacgtttttaatatctagtatcgaatataagacttatcgacttactatctattactatagagttagtataatagctagataggacaggaaattagtaactaatattatatatttccttaataaagaaataccctcttctaataatacagtctataatatagtctcgaaaagatttatcttaatcagtcgctatcttctatagaatcctacctattcttataataaggtaagttatagcggcagcccagatattaattagcctaggattaaattccttatatagatattgttctagcgatataaaagggtgtgaaccgcgatatatcctagatatatatatctagtttttctacctaaggcagaaacatttagcgctcctaaaatcggaaatttttaggcagctattagagctaagaagaagattctctagctttaaatcgcgataagtaattcctatcttataaatatagttaatactatatataagctgtttaaagaaacaatcggcctctaactcttctaaataactagatatagctactaaagaatacagatccctactagagtaatactctaagtatttataaaagctattatttcctatttaaagtaactcgaaagtctaaacaatattttaatattataataaaaaggatatataaaactcggatttaacatgcctctagtaagctatttcagttatttatactttacagcggaagattttaagtatataaaagcgataaatattcgggttctactcttagattttatgtaatagaaaaacggccctaaataagctatgacctagaatatcgtatatatccctatatttctaggctataagtgctatattttccccagccataacgctagttttttgattctctatctactatttctattctgaatccacggacagttataagtaaggttttataattatccccttctagtatttctagtttatctttcgattctctttacagaagagtcttttcgacaatagtggtcttagaaagtagcagtgatccctattctcaagtataaaccttttattcctaaagatatattttctaaacgtaatggttaggactagaattatactatcggttatctctatacccactttagagtagatagaagtttaagatatataagaataattgtatctacaatcgctaggacctctatattatcttcctagagtataagaactaaagtatttaaaagttaactgaagtagcttttaaagataaataggtatattcctatatcctaattagctaactaggcttactcttagtaagttaacgaaattctaacttaatatactttagtatatcaagttatttagtttactaggagagaatttatagataggatagattagatatatcacatatactttcgtaagataaggtagacttcctatatcgcactaataattagactagggaattagccactactctaaattcactaatacctagttcttagtcttagcaattctctgtttataggaactaggtatccttagtatatagagactgattcttagcgcttagaagttctcagcagtattgctattattaggtagactccaactagacttaccgcgattaggatatttcttcgattataattaaatatcggattataattaactactatctaatagctactaatcataaggcgacgtacccaccttatagatacagcctaacgtctcagcactaagcctataactagtaatagctcctataaacagtataatataggttactacctagtaatctaccgataaactaaagcttaatatagggcacttataccgactccttattataactaatcgcagatatcgtataagacctaataaatataaagcctataatccctatatagagcttatatctagtttaatactttagctagtagatactttaggtaagacagagaaataagcggcttagtaaccattatacctagctatagctagctacttaactaaaataatctctaatactagataagaaaaatgatatcgcgcctaactctaggtcaggcagtagtctactaagctagccagcttatatactggcttataaggatataattaaagaactcactactaagctagacaatagtctaccccttaacaaagtaagtcatcgtttctagcaatatggtcctaattaactagataaaggggaaggtatattgttagtcaagatttttgtacagtaggtagctaacgcaataatactagtaagagactgctatcctctttaattaagccgaggaaactagttaaaaattgtctaattctaatctagtcgtttattataggtactgattctagccatagcggttagttttagaattcagtcatagattaagggcagagtgatctatatagttattatcttaaatattgttattagattctttcagaagtataccgctaaaaagactatagagtcattacattcgctattattaccgacagggactatcttaagaggtagacagatattctcagtactattatctaagattataccgggtaatataattaagctaaggataggggatactattctagtggatatttagtaagatgattctaaagttattaaaggaattggtaggccttttactaataatataaaagcctagttgaaatagttaacttcgagactaataaagctcttctaataggcgagtctttacctatctagaaggaatacaactcaacttttaaagaggatactaggcctagagaccaccttaacattacctacagttctaataccgttatttatggtcgtaggtatagtatggttatcagtataggtatatttaccgaaattagttctattaccctcacattataggctagcggtagtaagcatcgtcctattaagcatagtcctaacggtaagactaagaagcggtagtatatttaggcctagactcttatatagatagatactataggtcgattccttagtattaatatcagaactctcttataaaggaagcttttaaaactagcctatttactatttagaattactattatatttaccattatttatatagctataaacttattcagtagtagtaaggaagttattatatatactattacaaccggtattagtatgattccagtatatctaatagttatacttactattataatagtagtaggtactaaatatatagttaagcggaacgtgattatttataaattagacttattagaggcactcggtactattatagatatttattccaataagataggtactttgacttaaggcaaaatggttatcaaaaaggcatagatcctatcttaggggatatactctgtcggctcgtctaataagccttttaatctaactgttagagatattacctacactcctattctacctttgtaactcattaataaaaaggaaggcccccctatagaaagtatagaaggtctagtctcaggaaaccgctagctagaagacttcttagatatcgcgtctatagtaaacctctcttacatttataagtctaaagagggagaatagtatatataaggtaaacctacagaaattactatttatatttttatattaaggtttaactagaaccgcgaccgctagactaagggttaaggtacagtatagtaccaaaaggctaaattcctatttaactcaactatcaaaaaaatgtccgttattttcaacaaagctaccctatataaggactatataatagtatttactaagggtacagtcgagtgtatcgtagccttatataccttaattatctaggactaggatttgttaacccctgtcctaataactaacaactaccgcgaaaggatactctagaatatagaggaactcgctaaacagggacttcgggtattagctttagcctatcgattgtatactaaccaggtataactacttaaaggttctaatctaaatcacaaagatatagagaatgatttatacttccttagactaattggcttatataattccctataccctgagatagtgggcttaatctaggcctactaccgggtaggtatagttatctatatagttactagtgattaccctagtactaccaaagcgattgcctagtaagtaggaattcttctagctagttttaatactatagcggctgatatcgcagatactatagttataactaccagtcaattcgataaccttactaataagtaggtagatacgcttccgaccctacctctagttattatacagtatactctatagactaaggtatatataatcgatgccctttatcgctatagttactttatagctataactagaaacagagtgaatgattctccttcgcttaagtatactgatattagtatcactatagggcaggtaggtttagatatagctaaagatatatctaatattatacttatagataataactttgccttaattcttaatactattaaagaaggtcgtcgtatctttaataatattcaaaaattcatactttatctattattagaaaatatcgtataggcctataccttacttatcggattagctttcaaagacactgataatcaatctatcttccctctatcgctagtcgaaattctctagattattataattatatcgggtatacctaatataggccttagaatagaggtagctatacctaatattataaaccgtcctccttagagtaagtagggtatatttacctaggaggtaattattaatattctagtttatagtatctagactatagccctctgcctagcagtattctctatctatatatagggattcggcgacagtaacctggcctatagctataataaggaatagttagaagagattaaagactataaactagtcttctaagtatatactataacgtttatatacttaacttagtttatactattcctagcttaggaaatagttaacttataccgctcgtttttctatatatagctaaaatctaagaaatactttacctaatagatatacaatatctagtagaataagttcctcttctagtctattatagccggatagatcactatattccctattctctatatccctattttaaacgatattgtcttcaaatataaacctattacctaggaatagggtatcgtagtagttaaggctatcctattctttattggagtcgaagcctagaaataggctaagcgagtcttctttcattatagagtgagaaagagcccgcacttaacccccttagaataaatccctaagcagccctaatatatactttccttagcctaatatcaaccggagctagggaataaacactatcttagtacacacgtattataggaaaccacttactagaaaacagaatattattttatagaaattacaggtatatagaggagaagggaaattctagaggaggtattataacagattataggtaggttaggcttaaggagtatattgcccctaggggttattttcttatacactaaatatatacttggttcgattaaactttatttctagaactttactaagaatacaaataagtaagaggagagaacttatagtaggtaaattatagaaataattaatataagggggtaggtagccggtagccttagaagagagggaatttgaagcagcgatatatagggctggtatactatataatcagagttattagttagtgccttacttcctctcacttattaaagccccacaactgctcagaaacacattgaggtcatcactgactctgagctcgtactaatatctaccagtgagcctaagtctaagcgcccttattaaagcgacggtatcccaagtaggaaatccctatccgccagggaaaatttggtatatatatactggaaagctcctgtcggtgagtcctggtcagggcggatcatgcttagtgagcaagagcatgatcgtggtttctcttttccctaaagcccgggagtgcctgggtataggatgtcgcacgtgacctggatgacagattaatcaattggttctcaacggcccgtcagcagttgaggtccccacatgtgattggtgactagcatgtccgtaacaatgcgatttggccttcaaccctctcgggccataagattagttccctggaaccattattgtcatgttagaacacatttgatgttatataccaatactctcaaataaacctatatcaatctttaagtctcttcgactgacacagcgaaggctagacacgggccggtcgtccctttgctcgtttttttacttccgctcttccgtgtggatgagatgtacatccgagcgcgtcgtatcctcgtcccaaatgaagccaacttcaatctctttatctgtcccagattcttatatattagtcgaaagattcctattataacattgttataatagcacaacattgtcatacagaaatttgcgagcaagacttatgagacttccttcagtcaaacttggtttgagccttatccctatctgggtgatcttcttctaggcgttcgcctgggagaacaatggcacggtcgagcttgtagggcagtccgcggtgacggcctcggatcatcatcacacaaatgacaagcttgctgaaaacggtaaactttccagatagagacgtagaaacagttggatacccaagactaagtccaacgttgccacttaatcgaaatcagtcaaggcaaaaggagtaaataccgcatggataactcactatgccgagacaacttcgaataacacagaaaatacagaaaaggcctgaattggttgaattttagtatcgcgaaatttgagaccaatcacttactggaattgacgtatctgcgatcttgccggcctcggcgacgcagatgcaaaagctgccgaggaaaatgtaccacaagtcaaaggtcagttggttctgaatatgattgacaatgtaagaccggccgttatgctcgtcgatgttaccgtcagtggtatatacacccagcgttctttcttcataaacattggaagctctgatgctaatggcaatcggaaaaatcgcaatatacatcatgaccaccaagctgaattggacggctgggctcacatcagccaagttgaaagttgatgtacccgtatgacgcgacgatgcggcttggaaaatagcagcgaggactcgaggaccgggtgcgagattattcacggcgggatttttcaagtccagcacaatgatgagaataacatcgattgagttcataaggaataagattccgaagagaatccacgtcggcccgcttgggaaaagcagcgtatagcaccgtcgcggatgatcgagcagaaatcttagtggatctttaagagaggatttagccgggcaaaatttgtagaaaatccagataataagtcgaagaaggcacggataacaagtgttcccggcaaatgcaaggaaactcataaggatcattgggaaagtcgcatcttgaaacgaaatcatcgaatctggtgttagagtaaagccaagattgtcaatcatcgtctgagaggagtaaaagcccctatcgcgcggtaaacgagatcagcttctataccgttgattatagttcatggagccgacttaccaccaaacattgccttgcccacattcagcaaggtaatcacggtatttcggatccgcgtgcagaatccaccccacaaggcagattgcaccgaataaatgcagaccaaagaaatatccaacaacaatttttaacaggagcttcaagcttcgatactcgataccgccgagtgtttcccgatctttggcagacagattatggaaccgagagttccggcctattgtagcttgtgaagacatatgcggcaaattgagctgctttatgtccctccgctttgtggttggcatccctcggtcagagctagaaaagcctcccaaaataaacacggaggttacaactcgctcaagggtgtgagtacgagactgcatgcttctagtagtcggtcgacgactaaggactttctcggttcgtccttgtaagaaccaggttagcgaagcgattaacttggagttacgtttaggcgcgaccttatcaggactaaccatcatcttcatcatgaagcctttcatcaatctcagaaaacgaggcacctgtatagtattgtgagaaacggaggaagatatgaacctgatttgtgtatacctctttcacgtttccacggaggcggaatatacagagctttatccttgtcggaagacggccgattgtcttcagcgaatgtaatggtttgctttgtcggattgatgttcgaaaccgctgtgtcatcggcttttgcatcgttcaattccagggaaactctggtgtatgagttagtacccattacgtttgagagtctgtagctgatcgatggcatcgaaaccaacctcgaaaatttgtcccaagtctcaacacacgccttttctttttccgagtcgtctatttcgtggctgctaaattgatcgttttgggcttcatcatcatggttattcaaactttttttgtgcttcaactgtgcctctgcgtcttgttcggggggagcctctggtctcaaaaggttcggagctatattttggagaagcaagttagttctcgatgatggcgttgggtagggggttaggtggtggaagacttctaaccgattgctttgaagcgcttttcaaaccatcgaacccgaaatacaattacgatgatgttgatgaaccccaagtttcctaggatcggaatgaggtataggtacacttgttggtaggtctttaaagatttgacgtcgacacttgacacccatggaaagtctttgtttagccgacttataaggatggaaaaaataacaataaaaactcacgtatttagacctgactcagtcgacgcgctggctccgaaaaaataagcatcgacagctttcagattaccatgaggatatatgataaccaagctcagaacgctgagggtgataatccacgcatctgcgaagaaggattagaaggggatattgtgtaactgccgatggacatacaatgcagggcgagaaagtttatcgatggcttccacatggcacaaaactcgcaggattgctttaggaagggttctaaagggcctgccaaattacattatatagcgcaggcttatcgcaatttgaataattaccgatacaacataaaccagagcgatagaaggatttgagtgtgagggatttgctaggcaaatcaagtttggccctgggtcgctgcttgcggcttgactaactcgcttccgtggctagcgcgctcttcgaataagcgaggctgagcatcatatagaaagctttaccccgtacagttaaatcagctgcctggggcttatttttaatattctagtaatatcattggccgaagtgtctctctcgtagcacgcattgcctggtagataacttctctttctcggccttgcgaagccttccattccagcgggacaaagagatatcaagcgactcgctagtgacagtcgacgtagcagagggccaacgagccagacgtaatggctcgcttttctaagacgatgttgacgaagattggtcaaccattaagaaggtaggcgggtagggtgctaagacattagcgtgggagtggtacgaagaataccaagttctcctgaaattggtagattaagctccgctccattaattttgcaatcgaacctgtgtttgtcaaaaatatatcatgtcctctgagccaaccgtcttgatgggctatctacggcatgaacttcttttgggtcactaatccacaaaagcagccccgcacgtgagcgctaacattctaagggaatccacttatgtaaacatgtcttacatcttgtacagtagtagaaatatgatgatcatgatggatctgtatggcgcaaaaaaatcccgctttttgcatcaaatgactgtttcccgccaggcaaatcaagggaatacttatatatgcaagttcaacctctctgatattacaataccgaccagcttttgttttatataaaatgaaaggaaaatatgtcagcgactccaaatggcccaacagcctccactgctgtcaccgcagtcatatgcgctgccttgatcattggtctatggtgagtatttaccagacattatcaacgaaccttaaagagtcaaaataacctgtctatttatctagtttcgctgcctttactcgttggttctgttacatccgaagacgttccacagaaggaaatcctgcggcagttcctcctagcgttttccagctgcaggcaaaccagtccaaagtgcaggagaaacctctgaccgtagaggacctcaacaaatacctacccatgatcgaatacaaaatgtggaagagccaacaatacgaacaaaggtgccatgtaaacattttatttgcctgcggtacaggcttgtgctaatgagtgacatagaatgagcttccctcaaactgcgactgaagctcagaagaccttgtcggaccccaatgtatcagcactacttccccaatctcccaccgaagacccagtgcatttgtccaacttgaatgcaagtgtcggggctcaaggtcaagtaaacctttctgaggaagttcggagtaaggacagacttttcgaattctctcttaccccgaaagcccctgaaagtagttgtcagactatacagagtgccgtatctccagtttggccggtagaaaaaacggtttccggtgatgcatgcgctatatgcctagataccatggaagatgagatcaaagttcgcggcctcccctgtgaccatgctttccatgttgactgtgtggataagtggttactctggcgtcgagcgtgctgtccagtatgcagatatgcttgtaagatacctccgaaagtgatgtaaaaagaaattggatagtatattgcttctttggtcacaatgacctgcctgaatgcttcatttccgaaggtgtgtccaccccgcaagaggtatagtacgtagtcatcgccacgagagcgatgtctgacaacaaagattggtttcgcatcaaaaaaaagaagaagaagaagaagaagaagaagaagaagaagaagaagaaaagaaaacggacgacttgctccaaagccaacaaatcatcgatacgtttcttcacctaattgttttttgtggctcggcacaaaagaggtggggcctagtagcctgccatcatattgggtgagaatacttcggtgtgattgtcgagcgtacttcctagctttagattacagggatggctcagactcatctgacagcggcgactatttttttgccgcgtgaggtgaggcttggtcacgccgttcggtttcccttagtgcggacgatataacaggatgggtgaccaaagcgtgcttatctattggcgagcactggtcttcatggggaagctggcgggtaccgccgcaaacgatagctagcacacaaacccaggcgtgattgtgtggcaaatccctcacgcaaatacgccgctgtcccgggtagtattgcatgcggcaattattaaaatcacgataatgccgcaactatatattgagtttggcaggcctcttctcattcttccacctttgtacagttcggtgcgtcttgtactatgtggaaaccaccaataaagtatcacccgtgcatcgtatgtgcattggtaacttctaaccatcactgacagacccgtggattatcaccctcagcgtgctgagcttggttatcatatatccttatggtaacctgaaggcagttaatgcttatttcttcggcgccagcgcgtcggccgagtcgggtctgaatacgtgagtgttttattatccttttcgatctcaatggtcccgctaaacgacgatacactgttgatgcgttgattttcagcgttgacgtcaagttcttggagacctaccagcaaatatacatatacctcattctaatcctgggaaatttgggatttatcaacatgatatgctacattgaccaggcaagttttctgatttggcaaagggattctttctgcttccgccttttcgttctcgttgacagcaaaggtctcttcaatagcgattgttttcgtcttctttatatcaaggatctcgctttgggcttttcttcaactcctcatctctggtgaatttgttccgctgttgggaaacctcattaaacacggctggggcgattagagattaagagcttgcagccagtactctgattgtttgaaaaagctaagtggtcagaagagatcaaagactgcgaactagtcttccgagcacgtgccaccacgttcgtttgcttaacttggtttacactgtttctggcttgggagatggtcaacatgcgccgctcgttcttccgcatgcagccaaaatccaaaaaatactttacacaatggatgtacgatgtctggcggaacaagtttcttttctgttccatctggccggatggatcaccatgttccctatgatctatatccccgtcttgaacgacgtcgtcttcaaacataagcccatcacttgggaatagggtatcgtggcagtcgaggctgtcttgttcttcatcggcgtcgaagcctagaaatggaccaagcgagttttcttccgtcgcagagtccgaaaatcttccatattgagttcgtccagggacgtcccggagcatccctaacaaacatttccctggcccaacatcaattggggccggggaacaaaccgccacatggtgcgttagcgcacatatcatgacttactagagacttactggaaaaatcaaccatagcaattgtgaataccgggtatcgagagtggattgtggaaatttgtggatcaagggtttgagaacttccttaaatggtgtatcgacaaggtgcgagcaaagcaagacagtgctcacggacatttccggcacgctggtctcaatattgaagtatttcataccaaatgcgttattttgtatgcatttttccgccgtcggcacttgcttatgttaattcctgacttgagatgtgaccccatgctcaatagtcgcgtggcaaatccacatttcatttgacaaccagtgttcatccatagacaggcacttaatataagctgaagcatattgaatttgttatacgtttcagactacagtgtcccgcttccggattcgcgctgaccttattacatatgtataagacaggcgagggagacataacgctaccactagatcctaacttttattccgttaagtcgggtataagaccgatccaaaccttatgatttttaagtaaggacgggcatacgtcatataagagattctagtaaagagatgacttcattagagatagactttcaaattgtattaatatatatatctaacccccaggtaataaacatttatatatttctcgctattatatatcctacttaagccaatttcaccctatctctttttaaataataaatcgttatttatatattctattatccaaagaaaagggcctattaacagtatataagctattatttacacgcctaccatattattcaatatatcaagatcgctttaactgtggtctattaccctatacaaatttcagcctaagcttaagtctctaaaataacaaaataaaccagagccgaaaactaagttatatatagactattaaaatactatattactccctctaggcgaatgttctatttacctggaagagctaggttcaatagccgtctttcgccagctaccttatagctatattatctattaaccttacgcagatacctagctttatattagcgataccagctacccctatatcgctagaggttctattatctacgaaagccacagactctaattataaaggaagcgcggtctacaggttatagactaagttcgctacttataggttataattcagtatattggttctagatcgtaaaagcctagtttaggagaatattatctaggagcctagtagtagccttcggttcctataataggagttgatactttacttataaatactagatttttttaaattaaatctatatacaggaggttcttagattaccccttatttatttaagcagtcgttcttcttaatacctcttactatcttataagtcctctaccatctactaatataaggtataataatacctagtttctattataacatttctatactactataagttcaactaggacctttattatttatttcgacttacctacgatagatcatggcaatatcccaacttcgaatagctcgctacttagcagagtgatttcgtagattcccacaactttcctaagggtagccctattctacacgtactctcgtctatactataactaaagtaatatacttatataatataatatatttagtaaatatataagttagcccattacctatatctctgcctaataggtaaaacggcagctattctccctatatagataattcttctttagcttcccctagtaggaatccgaataattgactataatcttacttccagtagtcactccgcgagagactataagtatatattctattctacattagtaaaacttctaaaactagctattagggtaatataagtgattaataaagtaagtaaaattacctatttaaccttagaagacctaatatagtcgttctgggcttccgcctatcattacatctagaccttcaattccttaagtaataaggccaataaactctacaatagctatacctcggtcgaattccttctaaatattagtgattactatattaagggcagttagtaaagactagataggatatctacatataatatatatagcaggtaattaccctattattcttcctactagctatattatataactagataggagggggataacgaataccactaaacaaagccaagaaataagaacagtaattagagattatattatcggtctattattccttatacagtcgataaatattaggatcaatttcctacctatatcgagggttatctccaccaaatatactaggatcgatcatacagttattcataaacttataattaaagccgtttagtaatattagatagcggtaggtggttttaagcggtaatactagcctagtatctagcgtaacctatttataagggtaaccagagtatcggtaagacccattttagctaataactcagagaaggtcttactaaccagggtagagagtatctacagtaactttaaggttagaagcgatatagtataaccaagatataagtccgttatcaaagcctatcttatatttatatacacaataaataccggacctagtaaatattagactagcctaatccctagaatctttaatttctttatagctatactaaaccgccctagagaataatcaataataaattctaatatatagatataaggaaggggcgtttaaactatagaccgaaagaataacttatatcctatttctaaactcctttttatactatattaatataatataggcttcttttagagctactattcgagcttcagtattcgtatagcttaggaacttaagataaattaatataatctatactttatagcattctacctagtatacttacactactatttccagagcctataataaccggctctagttatagtatttcttatataaaccattaatagcccaaaaaacctataaatatcgctattaggatataataacgcctactaccctagtagaaagaattcgtacatactacttaactaatactagttctaagactgaattctagtctatagtcctatactctagttagtaatagtggatttaactagcgtagacttaatagaaaatatactagaaacgagatactcaaagtaacaggggaatatacttaccgctagatccctataataaatttatctatagaagaggactatagggtaggaacagctatatcctttataggcttcctacactaaggaaagtaggtatcgctatgaaattactaaactaacggttcgattctaatattagatagttatagacaagttccggtatctatatcgctatctaaccctaaatcctctatcgctactactatagcagatgattttaacggttgtagcctactaacagtcttatatctaggattgttaaagctatccttagatatagaggtcactggatacctatagctagattataaatcagactttaactattctaaggatctctatatcagtgactaatagcctctaatctactatcaatcgctatacttactaatactagggactttaaataggtaacctagctaggcgttatagttaggatctagttattttctacctttaactatccctaaatagtattattaatataggtaaggcttcgtctaagaggtttatagatcattttatactaaaggtagcgaattgtcattctaagtagttattttcgatttaagactattcgaagtatatactactatattaatatataggtagataccattatataggccaaaagaggccagtataaaggctagccggctagtaaaatctatattctcgaataaatcagacaactttttcacaactaggtggtatacaatcggatatatcgtcagtaagttagttattacctaatgtgattagatacagtcgcctatacctataagtattaattctacctaggtagaataagataactcagctaattctaagagaatctaggcttagcttagtataaccttacggtaacgtgataataggcttttagatctttcggctctttaataggaaacagatatgtttatactattaggaaggcaataaaagtatataggttactaactaataagctaggtcaaataatatattaagcggtactagcttatatagatagtagaaatttctatctagtaaaggaaaggggcttagaatactatatatactagtggagacctatataccgagaacagatggtataagctttaaaacctgagactcagataaatttagttagggtatatttagttagggctattagactagtaactagtaccctactcctagtaggctcttattattataaagcctcctatcctactcactgctatagtccttctcttcgtttctactttcttatttatagtattcgtaaacagctatctataataccgatatccaagtatcctaaggtaccctctccgcctctactaagagatatactatatacctcttatacttataacaaccttatagggtagaagagtatatatatccttcgaatcggaagggaaatataccacaatatctagaggtatcttccctattactagaataatatctataatatatagatatatagaactatcgctagtattatatatatatactttataaagtaggttaccttagctcacaactaaacttaaagctaatatatattctctagtatactcctagctatagcgtatacactagatatataccggagaactaggcagttttatagtattaacgaagcgctcttcttatctaccctagcggtaatagtattcagtatccttatagtacaacctcttactatcgttagtattacagggttaatttctttatttaactatactatatataatattataaagatctataaaccctctatataccccgaatttatatattaggtaggtatatagggcgctatattctattagattattactttatacaatatatatgactatatacactacgctacagatttcttaagcaaaacgttcggtttttatatcggaaccatctatatcagtaagttatacttccgaaaactaccttcttaatattaagaagaataatacctaactctaaggctaggtaagggtatagaggaacttatcagcgagttcactagtaaggggtataccgctaggtttataagttatataatcgtaatactatatttcctaataatctatagcctagagaccattaggtcgagtactatctagaggcctacttttcaggatttactagcagattatatatatatagtatatagagtctaattatactaggctactatttagaatcacttacactctttcttatcttttctatatagattagaacaattttctggataggattttcgtatatcctaggtcctctcaaagttatagatatatcctatattcctattagtaaagccttttacctaatatagccgcaaggctagctaatttacttttaggaactagacactaaatagatttttatagcgctactatttagatttctgattatattacttttctattataattatatataagaccctatctagggaatagagtcttactcctagctataacgctaactttatagctagaacgtcagtagcctaacggtataagtacagcaattcctactaaagaagcctactaggttctattaggacttttttcttcttagatataccacctttattttaggtattattagtatccctttccctaacggattggttctataggtataaaagctaattcaagtcttcgaccctataccgaaattattaataacctatactaggcacctatatatatagattctttaatagtatataaaacagatatctatattatactaactaaggaaggaaagggcgccgagatccactgtataatagttaaggcaactacggtagtagaataatatatatcgcatttcgttatagggctagctattattaatactataacaggccccctcctaatcatcctctatactatacctacagcggtattcgtaggaatattttttattataggatagggttctattagatctagcggtattatatagaaagcgatttacttaatactagaggaccgttttatataatataataaacctcttctaagggtacagaaccgtaaggtcctactatagattatatatcagctcattagaattacagcctatattactatctctaagacaattactactattagtatcctctttcctcccgtctagctttactaaagcgaataactgatttctatttttaggttttcctatattaataatcgctttaatcctattctaggtatagattattcctaaatggttttctagggataaaataggggtactagatgatataacggctaataataaagctattctagctagtcttagtagatcacctaaattccctagaaaggagcgtctttaggactataggactaagcgtcagtacttagagtagaagaagggaattagtagataataagccagcagtttatatcgttaaggtaggtcaatttccctaggaactaaggactcgctaaactttatatatattaaaggacttccctaacggatattaatattattatagtgctctaagtaggccaagtttattacaaagattctaagtacactaagctcttcgctctaacttttatatcctatttatataataaaagcacatcattttatattattatagcttacctttatttaaatatagtaacttaatttaaataataaagtaccgattagcttatattagtactaaaggtatacgaaaccttatggttaaggtatactaagagggtaagtacaagtattaatagttataggaaaaagaatagtagaggaaactagtccttataactctaatagtagaattattatagaccgaagtaatattaagcagtaatttcggataaatatatagatagctgatattagatcttactctagcctcctctgtaaaagtagattagaccgctaagcaattaatcaatatctgcgctttattataggagaccattttatactaacctttaattaagttgtataatcgggtatcctttagtccttctataacactgtcgctaatagtttatagaatcttattcttaataataacatttatttatatatcccaataatgcctaggagagctatactctattaaatatatgataaatagtatattattacaattatcggtcacttttatctctatatcgctttacttaataactgatattataaacgaaccgccgggctactcctacttttataccttacttaataaaaaattctaggtcttagtcttcgaaaatttgcttaagatcaagacagctttcgagtgctatatcacatactttctatatattctccttaaaggcttcgctacttacctataactagtactagatagtatagttatttacagtaatatcaagaagcctaaggataataatagaattaatatagctaggcgttaaaagtataatatcattactagtaggtatagatattaatacttaagattgagctaggaagatattaatatttattataaggtatatcgatctaattataggattatctaggcttttcttccatcttttaagccactggttctcctcagtataaagctatttataaagactattcagaacgttattataggtctcgattactcctccttaatctatatatttaacgagagtttttatataatataatcgtaatttatagtgttttcttctataatcctactagcagtattactaatataccctataattctataagatcgcgcagactttctatacaaaaccatagaactataaatatagatctttttctatattatagtaattagataaattaataataaatagaaacttgactaataacttaatattactaatacagttttatacctatataatcgattagatcctctttaggaggtaagatagggaaggtaaggccaagtaaccagcttatagttaagtaactaaaattaactctacctattactatatagataccttcgcttttagatatcagcctatctatagattatacaaataagcttaatccttacttttatacttgatttcactttaaataagggtttcttctcacatttttcaggatacttagcttattagttagatatatcacaatatataccgtacccttataatacttctacattctatatatagctatatccttctacctaatatatctataccgctctatacctactattactatagcctaggttagccagaggagtacactacattccctaatcaccccccttaagcttgtgcgtatagaatcgaataaagagactaacgctaactaggctaataatagtattcaaaagaatcgcctagacactagtgtagaaacctttatcactaatatacagagtttcgttatatctaatttcaattattaggagcctaatctcaccgcgtactattatagtagatcctaaaagtattacagctagctaggcccgtttctatatcttccccttctcctaatcgctttatttaatacttaggatctttttcttaacttttagtttcccctatattttatactcttcgtatgactctttataggattttacccctaaagtaagttactatataggtacctagattctaacgataaactatttattattttagttcgattacttaggaacaacttttaaatatattagtatacctttataaacgttattaggagggtaaaaacaattcctttctaaatatattccttggtccatagctctaaaaacggaattgtaaatctaatacttaagaagaataatagttccattaaatactactagggccctaacaagtatttcttaaaggtataaataaaagtagggcttttatctaccttacgctcaccctcctcgcggcttagaataacaaatggtcccttagggtacttactcagtatatatataagaaatatacccactaggaaggtaccaaataagacagatataccagtaaagctagcgatagttataaaagccgaaagaataagggttataaggataatattagagatatagtcgtagcgcataaagcgatattcaatgaactttcggaaaaatggtataaagacccattttgtaacaataggtattacagcagctatacctatcgataccactattagacacctaataagccatcctaaattaatactatcgctacttcctaaaagtttacctaaatctctaattatactatagatagttagcttaataagtttattataccttatctcatttcagataagtattataccttaatataacaagtcctataatattattaataacagccgcgcttactaaaactgaccctactcgagtctcagcaaggttaactaaataggacatagagctgatcacagtaaaggtagtccctaaatattttttagtaatagttaaactaacgcttctagggggatagtttaccaagtaaagtagtagaaagagatatactaataataaaggtctcaactatacctagtctatattaactgataactaaaaatttagggtaaataaaaccaactatatctaaaaccaagaaagagcaaaaggtatgaaatactaataggaaataaaaccctagttacagcgctaattatacttaaagtaaagttctacttaagtaagtctacacaggtactaagaccgcctagaataaatgacatcagtgtcctaagaagctaagaagccaagtagcgaagcagctataataaaaattttcacttaccttcgaaaataatcaaaatcagcccaatatatcctaggctaacaaaagtctcttactagtgatattaaagaatattagctaagggtactctgtagataataccgataacgatttaacctataattccagcctagattgcggtcgcggagacctaccttataagggaaaggaagaagaagaaagaaacgagaataaggattttaataactgtaaatatagattagtgaggaaatgagcatagatcaatcggcatataattaggtatatacttcctggttcgtggtataggaggaaactaccggctatactcgagtttcgtctttagagtaagatttaataagattaaataagaaaattggagaagggctgttagaagtaaactaaggacctcctcctacgtgacacaaattcgtgtccacctgttcccacggttccatctgacgccgaccttttgccccaatcttgtcctagtccgctcggtcataggcctttcttattttggatgtggggttacgtggggccgcgaggttctattctgaataggttgcccggtgatctgacccgtagttctataatttgatgagggggttaggcttttcggttactgtttgatcgattgtggacgtccacctggctaagggaccaatatgttactgttcctcgtgggccataggcttctaagaaaccgagcagctcactcgcgtcctctgtgaagcgaggctaaatgtggttaccgccctattttggttggtagcggttgaagtctccggttgtccttctttcatcccggatggtggattggattgcgccccgggcagttgtcagcgctgatcctgttgatgcctcgtgcggggtgtgtagtggcacttgttggcggtagactgatcagaggagaatcagagagtagctgaagcgctggctaacaattaacgatcttttcatggcggagtggactccggggaaacgattcggacttttgattttcctcgcgttgctcataaagatgaacaatcacattatgtatacctgtagttaccgactgtacctatgcgaaagagttcggaggtatagctgatttcgaaaagtactgtacctatgcgtcctatgggactgccctgatctgcgggagttgcggcgggaattacgggagaaagtcggcgacgcgtttaataacgtgtcgagcttgctagggggttctcaagaagaaaggagaggtcagatatatcatgcctcgcgagccaagacggtggatgctgtattggacttcgcggaggcatcacaaagattccgcagtcgcgcgccacgagggcagcttgacaacgtgaacggcaattaggccacgaaaggccttggcgaggctctaagttcgttccaggaagtggtacacttcgcttgtaggtacaaggatatatagtcgtgataattcctatgcacgctcttggtcgctcctaggaatcaggcttatcgttcctagaggacttatagctcccaggagtgggtggtatcgctcccgggaacgaggagggggttttccgagctttagtgcgttaagtaagatcggtgccggtggatcacgaatcccgggagcatgagggcttcctgtgagggtctcacgtatacgtagatgaggactgtgtttcgtaaatggataatcaatattaagaaaagctatagtcgactctagatacaagacgtagcgcgaggaagcaaaagaaaggtagcttcctcgcgttcaggggaacccatatacaccatgtgggtcccgcgcagatcatttctccatgcttcatgtatatctctgacacttcccggaattaacaaataattcttggaatgtatgaacttcattggatcgcacatcttgaagattaatctattaggagtgaaggctcccgagttgacacaaggccaagtactggcaatggatttactccgccatggaaagaggaaagtatgctttcttggattaagccaatttaggaaatgttacacttccgaacttggaaggacttaaagtgaactgtgagagcagagagctctagactagaaaaggaggttctagttgagaagagattctggaaaaagtggattgcgagagcagagagctctagactagaaaaggaggttctagttgaaaagagattctggaaaaagtggattgcagagagcgattgctctatcgatatttctcaacccatttctacttttcactcagaacaatgcctgagctgtgtttcccaagcatgtagctcttccaacccgccttttctagatcgatatctgcgtctccagacataaacttcatgaaaacaccatgtgttacaaccacgatatgtttcctaggttcattgttcaattgatcggatatttctgcgacacgagatctcactctcttcgcccgctcctttactgcctcatcttcaggggcataaattccctccttcaattgccagccttccggtaaatctttgacgcctagtcccggaaaagccttcactagggccggacatgtggatccagtatcacagggaagcgcacttcgttcctgcaaatctggatccaagataagggtcgcaccattttcgataccatggccagagtctaggtcgaaatagcgtttatcgaggacgtgtgggaaagcagtgagcgtggtttggatggcacgccgcagtggagaagtgaggattatgcccacctgtggagcatgaggaaacgtttgggtgagccgtgaggcttgttcaaagccaagaggtgttaggccagggtcaagttgggagaagtctttggaaacattgtgggtagattccgcgtgacggacaagatggacttccgaagtcatagctagagaacttggaattagtagtgatctgtttgcaaatcctccctttataatagttatagcaacttaatgaaacaatttctagagtatattgcgtgattcttcctcgttccttgagtggtcattattataaccataaaaagtatatccgtatctcgatgttctaggctagagatattagtaactgccggtgtaggtccgaagtctatcttaaggcccacttcattacttcgataatagcgtctcgtaaatctaaaggggttggtagttatagtagctacttaggacatgaatccatcctttctttctgcttctcctatgacagtcatttaaaagtagtgccagtacattggtctaagggttgaagctgctacgtgacataaagccacggctatttatcggctgaaaatcgggggagtctatcccgacggatccatccctctttattagtatattgaagaaaatggtagtttcacaaattgacccgtcgctttgcaccatatcacacataggctgaataacgttggctaccagaatatgctatcgtcccactactccataccagcataaccctaagatagcacccattacaatcgccacgggtggggcaacattgaaccatgcgctccccgaatatgttactgccgcaacaaccacccaccatggttccttacccagactctgtccgtcgcttctttcagaagtcaggtatccaatctcccacaaccggtatacagctgtatatactagcccaactgcagtggcattcactcctctgaggaagtcgaccacatacttcttcttccgcaacacgcgccagaagctttggattgcaacggccagcgtgattcccggaaggaagattcctaaaccgccgaggaacgcaccgaaggcggtcgggaattgcgagcgctgtagtgctagtgctcccaaaaagacagcgaagttgaagttaggaccggggaaggcttgaataatggcaaggccgatcaggaagtctctactagagacccacccgggatcgacgacataggagcgtaagaggggaatgacgacaggacctccaccaaagataacagtgccggcaaggtacatattggcgaagaggtctaggaccaatgggggtgtggtgatctggcctctggcaacaagaattgcgatgaaggacgctaactatattagtgttgacgcttagggatcttgtcagaatggggtgcgcaccgaaaaagagaaacataatcagaagtccaatccgaatccgaataatgtgctgttgtgtgtcagcttcaacggacggcattgggcttgtagtatcaactgtgctctgtggtagttcctcgactctaggatccgtccttcgcgatcgtgtcgtctcactcctttggactctattctctcccagagttgtatcatccatggctatggagttcccatttgccttatacggttcctggggacgatgatgtctgtccttccacgcgagttttgctctcaaaaattgctgatacaaccatccatcccagatgctggtgaggaaaccaccgataaccatcagcacgggaaaataccagagtgcattgtaacagagaccagcacatgcgccaaagatcacgaggatacgggacagtttatcgcgaatagctttttcggacaactgtacagccgcaagtgcaacgatacccactgtagaggcattgaggccagaaagtaaggagtaggcaggttcgggaagagtttcactcatgttttgcaccccaagtgagagggcatacatgccaactgcgccaggaagactgaaaccgttagttgaagtctacagatggcgggcattgcagcataagggtatgaattaatcacctccaaagtagaaacacaagcatggcaggaataaatcctgcgtgtaatagggctaggcaaaaaaccatcttcgtgctaccgggacccggaagaccctgacagatagcaaagagttcctgatactatgaaatttgttaggaggccctatgacatcgggacacgccaacttgaagataagggagattcatacagtctgttcatctacccatttttccttgtcgccctttccctccacgaacctgctgtgtagaatctggaagtgtactggtggtcctccgaaggctgtaaagcctagatcccatgtacgcagaaaaacgtccaacagacggctcggcaggggctttcccgatcccccattttcacttgaaacccggcttccccgtttgtgattcagacgagagagggaagagaggcctcgggaaaagggggcgaggagtggcatactgctccttaacagctgcgaagatagatcgctcaagcacaaatagtaagatagacaaggaggatgagactctcaaacgtgagcagtgctcctataaaccatcgccgtgcgttctaggtcaaatacctatgtagatacgcgggatccatgaatggaatggatgggacgtcagggagccaagatgtttaggtaagctccagcattgcactaaagtcaaaacaaacaaccaatcaaagacaggcaatgaagcacgtgctgtaccaaaatatgggtctagaaaccctattcggaaggggaatgtcactgcatggcgtttacttgacggaggcgatgccaagcaatggaaagagctttcttggtagtcatccgagttagcggagtcaaaatcaagttaaagcgtctctgaatgtggcaagttgatatgtttatcatttgtttatgcagcctggtcaccaactcttggcaagtcccacagggtaggcccctggggtggcccctgccctaacaggtataattaggaatacaaattttagaacgcgggtaaaaagagcaggcaacagaaagaagagctgattaactgggcaaaaatatggtgcgaagacacagtttgaagagaggcaggatgttggtgaacgataaaatgtaacgttatttgggaaatgacgaagcatgcatcttaacaatgcgttctacgttatcggtagaataaacaaatatagacacctagtggcaagttacaagtggttaagccaacaagtacaaggattgtttggatatgatgcctggggaatctggcataaaagtgagcatgccataggcccacaggttttttctaggtaggtgggatgaaataattcttgcaacagagttggggggtgcctgagtattaggaaattcacttggtttagagtgaagagtgttccctagctaagcatactcaataaatacctccttctttcactacgtcgactcgtcttccagtactcctccttcagttataatgatcacgagcaccggtcgcctaaccgagtagaccgagaagcatgtggctacagtgcttattcgatcaagatccggatcttgaaggccgaacatgagctatgccgttacaccacaacggtagttggcggcaaagtaccacatgaccgttgagatcgcggaatcatggtatatcttgggattgatattgtcccgtgatcttttgattcgtgagattatcatcgtggacgaatcgtagtgtttcttatgatacaactggtctgacgggggcttgattcatgggaagacccttagagttgctgaaggatcgtgccatttcttacgacagcgatggccgtatctttttgcggttcgcaagagagtcagaactcgcggaaaccgtggtgttctctaggatctgccttttcgtgtaggttcccccgaagggtctaagattataaaacctgtggtttctcctatgatagagataatcagaggacccccgccttcgggagagaatcagagttcgcggaaaccgtagtttttcttacgacaaagagaatcagacgatcttttggtttatgagacataaggggcgcgtcaaccgcctaataaattggttcattattgtgcggcccatgcatggccggtttttatagaatcacccgagccacgacgaaaaccatgacctttccgcaacctctgtacgatactccgtactacggagtccgtagtggtgttatgcacgtgacttttctgacttgtagattgattggttattgatggcgagtttgtggcatttagcctcgcttctttagacagttgggagaaaacaagccaggccacggatcctttctccatagaacgtgatactgtagccaacgatgtagaaaaatgaatctgacaaatgaatacaatcagttcgagggatacagtataaatttcccgcgtaaagctaatggatcagaggaaccaatgtatgattggggggattgggtactctggtattcctttctccaccttggagtaacatggctgacgtcacttctccttgtgacttcataagttcgtgcttggtgcagcgacctctccgctcgcatcctaggggactaaatcaactcatagaagcttctggagcattggctgccatagtcgcagctgtataggccattttcgatcatgtacaactggaagcaacccaataaggactttgttgctttagggtggggaaaggagtaactaaaagccaattatatttctgctacaatgccattatttcattggtcagttgttactcctttctccaccttggggtaactgactctccagtcgtcgaaaaaagagcggggccgcagaaaaaaatatccagcttaacacaatactttttccctcttctcgtatttggtcaggccatgccatgcagatggataccccggttgaaagggccatcaagtataatgcacaaaaccggaccagtgggtatagtacccannnnnnnnnnnnnnnnnnnnnnnnnnnnnnnnnnnnnnnnnnnnnnnnnnnnnnnnnnnnnnnnnnnnnnnnnnnnnnnnnnnnnnnnngcaaaaaccgggaccagtgggtatagtacccactggtccgtttcagtcaagaagtttgcggcgtttgatcggagagtcctggcttcctctagtcttgctggactctctaatcttgctggactctctagccttgctggtctctttagtcatgctggtctctctagtctagccggaggtctagtcttgctggactccctagtaccttgcttgaaatatcatttgtgaaaataaaaaataaaataaaaagaaggccctaaaggccagaacctaagatagctacgctatgcagttaaccgaattttccaaaggagcattcattatttactgttggccctcaaaatcagaaattccctgttataaacagacctcgacttaatgcgttcctcggacaccattaattggttggaacgaactattggaacgaactaagctccctcccttccgtgctaggcttcaaaatgggcgtggcaataaatttggtaggcacattttacgttcatcacctactgcagtgaccgtttcagagttttgctggtcatgaactcgaatacccgcagtttctggaccgcggattcctcgatcgtccctggtcgtggttttcaacgcaaattcgttgcctgctgtgaactcatcactctgccgggggccgtttcaggtattcgttgaccatgaactctaaagaccacggttctggagcgcagcactccttttcaacgcgaaaacccatgaacatgaagagagccgtgttgtacctgtttgtagtcttaagaatccctgagagccattcgtctatacctgcgactatttagtgccctgtttccttgtcttttccaacagtgactcgtctcttcatatggcttccgctcctcccacccatgtgttttttccttaaaaagaaaaataggtgatgaaaaggaatcaaaaggatgaaaagaaaggccgcggtaattatcattttgagcgacacggttcttggtgtcgcaccaacacctcgcgtttcacgttacggaacctactccagtaagtccctactctccagtaagtccttactctcattcagcttcaaagttacatatctctcgcccagagacaacctaggataatcttcatcctaggaaataccacacttttgtggtttcttaagaaattctctatcctaagatcatctgtatcctactaaataccacacttttggaaaaccgtggtctgcctcaggaaacagattgtctggagaaatgaattagcctgggataacagaaccaaaaaaaaccgtggtctatctcaggaaacggcttgtctggagaaactagttggcctgggatattgaaaagacaggaaaaccgtggtatcaaagtttggccgcgatcttgtggtttcttaagaaaatttctatcctaagatcatctgcatcctacggaataccacacttttgtgattcattgagaagttgtgtacagacgcactcgaaatcagttcactgatttgttctctttgattgcttttcaaattctatttttattgacgctaggcctaatgtagccaaagaaaggttcattgcccttttcctattcgacagtcacgggtcggctaggccagatgtaggccgaagtggatctggccaagatttaagaagaatcaaatagaaaaaaaaaaaaaaaagatgaaactgatttcgagcggacctgtatcttcagcatcctgtagcaacccggatccaccctgtaccagcagaagtgagaaacagagttagggatactaaggcgtggttaacattaccttcaatatacattacttgtggttgtgtgccgagcgggagctaaccgcgtaccgatggtggacccacatacgggagggcccgaaccccctcccacaaacaccggagaaaaccccaccagcttctcagtcgaggacttccagcctcgcgtaccgatcgagccgcttcctgagtctcgcaaaagaacacggagcgatggtgccttcacaccagtggaaagtacaggccgggttaccaccagggaagtgtggaagctcatcgacagcctgaagttaatcatccaccaccaaactgcactcatcgaatccactaagaccgagatcgaggaggtcaaacacgaccagaatgtccttcgtgaccagaatgagaagctctacgaggaaatcagagctatgcgagctcaaatcgacgcactcccaccagcacctgcgtccagaacatgggcaacagttgcggccagcagcaacgttgcccctcctcaacaaaccgactcgcggccagacagggacctgaactgcgttcgtattagtacccaacgatcatttgtggatccagcggacaataataacagcgatagaaacaccttcggccgataccttcccacagattccgctaacagccacatccgcaccgcgctgatgaacgctccaacaactcaggacgcccaggtcgccgggattggcacaaccaagacaggctacgtgattcgatttaaggacaccgagtcggccgagctggcccgcaacaacaccgaatggttgaatgaactaggaaacaatacgaaaatggtgaaaccacgattcggcatcgtcgtgcatcgcaccccaacagagcatttcaatttagagagtgcaaacacccacgccattgagaaaatcatggacgaaaacagcctcacgggacagggcttccaaatcgaggaggtagcctggctcaaaaagaaggataagatattagggaaattcgcatctcttggcatctggttcgactcagcggagggagctgaacgcatcctcaacaacagtcttttagtgggccagagatacattagtagtatggaacgccgcgagattaagaaaaagagatgcttccgataccaaagtttcggacacctagcgtggtcatgcaaagaaacaccacggtgcggacattgtgcgggccaacatgaacggcaacgatgcctaccgggcgtcagagcgaggtgcctagactgcagtggagaacatacaactagagaccgacagtgtgcgacccccgcatctttcaaaccccgtcacccccgtcaatgctagagacaaacctacaagtactacagttaaacattatgaaatcgggaccaagaatagaggccctcattaacgatcatcaaagccaaaacctagatatactcttgatccaggaaccgtccattaccacctaccgcacacacgtcaaccacagctcctagcgcctctaccgcccaacgaccgagaccgatacagcccgatttcgcagtctgatctatgtgaatcgtaatatctctacttcagcataccgacaaatcccatatgaccacccagatgtcgctgcgatcaagatctagacttctgactctcaaatactattcttctccgtttacatcccttctattcccttatatacggacagtaaggcttcagcagaacctacactcaccgcaattcaaaacacaatcacaacgactctacaagatgactaccgatcaacaagcatcgttctgggaggagacttcaatcgccaccacccaatgtggggcggcaactgtattcaatcacaatttatcgaagacgctagtgacctgatcgcgttctttcaagcaaacagtcttcacagctgcttgcctcggggaactgcaacctactggtcgcttagcgatccagggaggaactccaccactaaccaaacagtaacggatcggccagagctactagtcaaatatcacctttaccacgaaaactacagatcggaccaccgcgccacgtactccgaatggaatcttcaagcccacagcaagcgaaccccgcagacaaggaaagcttacgaacgtacggactagaacaagattggcgaagaattgatacagcgaaccggcccgtggaaagaaatcaaaactcaaccagcacttgacgaggccgtccaaaacctcacagaggccacaacggcaggtatcaataagtttacacctgacatacgcctgacaccgtactccaaacggtggtttacgccagatctgaaagtccaacaaaccaaagtcaaccaactacgtcgaagatggcaggaaaattgtagaatactcgggcgagatcatcctcactccacaactactttccaagagatacaacaaagccaacgagcgtggactcagacgattgagaaagccaaagcatcacattagaggcaatttctagacaaagccggagagggaaaactctggaaagcggccacctacatgaaaccaagggagacgtagggttgtatcccggcactaaaggtagacgaccaagagcttatcgagaacaaagacaaggcgcaggctttcctagattccttcttccctccaatggatacccccgaggccaactcaacaacaccggcaccactagggctcccatggcagcctctcaccaccccagagattgaacgatcgctccaagcagcaaaagggaccaccgcaccaggcaaagacaagttaccgatgcttatatagaagcacttataggtccacctgaaagataacattaccaggattttcaacgcatcactaagtctagggtaccacccgaaacaatggcggaacgcaaaaatcgtggtactacagaaacccgggaagccagactactcgctcccgggggcctaccgtccaatctcactcctcaacacactaggaaagcttctcgaagctgtgatagcccgaagactctcatacctcacagaaaaacataggctgctaccagacacccaatttagtagacggccaggaagaaccaccgaacaggccctgctggtactatcaaccgcaatcaaccgagcatggtacaaacacaaagtagtgactcttatctcctttgacctaaaaggagccttcaacggagttcaacaggcaagtctcaatacttacttacaagctagaggaatccccgccatagccagaaagtagatagcgagctttataagcgaccgatacgctagcataggatttaacgactaccgtaccggagtatcactgttagagaacgcgggactggcacaagggtcccccctctcccccatactcttcgcgttcttcaacaccgacttagtggaccaacccgtcacccgtcacagtggcgcctcagcatttatcgataactattttcgttagagagtgggccgctcagcagaggagaatctagcaaagattcaatccaaagacatcccccgcatcgaggcataggcgcgcaagactaggtcctacttcgcagcccagaagaccgagctcatccacctaaccagaaagaaagctaagcacctacagggtcaaatagtagtaaacggcacagcagtctcaccctctcccgtagccaagttactgggtgtgaacttcgactaggaaatacgatagaaagaacacgtgcagcaagcgattaagcgcgcaacgaaagtcactgttactctcagcgggttacgacatttgcgcccagatcaaatgcgacagctctaccaatcatacatcacgccagtgctggactacgcatcaaccgtctggcacaacccattgagggacaaaactcaccttcgacacctcaacacagtgcagagaacctcactggtccacatcctatcggcgttcagaactgtggccacagcaaccctagaagtagaagcgcacatccttcccactcacctccgtctccgccaccgagcacaacgcaccattgcaaacctccatacgctgccgcgggaacatccgatctgggatactctctcgcgagcccaaaaacgtagaaacaatatcgggtcgtacgctcacttcccgctggcggaagcgctgaagaccatggacctccaaaggctcaacgagctagagacaatcgacccacagccactgccaccatggcgcctcgaccccttcgtggagatcgaagtcggttcagactgagaagtagcaggagagcaagctgaggccgtccgctcaacatcagacattgtcgtctactcagatgcctcaggacgcgatagccatttaggggccgctgtagtagcattaaacgtagatatagagatggttgagtcctaatatatccaggttagaccgatggaccgctggtcggtatatgtagcggagctaataggtatctatcacacagtcggcactatgttcaagatagcctaccagtaactaataccggaaggtcgataaactgcgacaattctttgtgatagtaggtctaccttataagtaattaagagcgtaagaaataagttaggataacggattgtttatacaatctactaagccgcgactaaggtcaaaatagtaggtattatactgcgcctctagtaggtactaggatattgtaataatcctagtaacgatactatagactaaatagtaaagtataccgctagccctagtaagtcctatcccttccgcctactacttataagggagaagggtttaatctatagtaatattaccacttagtaggagtataaatagagaatatctagtaaaggcggttatctatagaagattaataatactctaccggtaatatatactaggaagctatatagaagtctacctaggggccgggtatacctactaatacagctatatataggctataactagctatctacctactataagaagattagttataataataatgaccgttatagctatagtatataagaaacagttacttatatacttatagactgcctaatactagtagagctacgaagaaatctaaagagagaagtaggggatatatttaatagtatattaagtctactaggaggcttaaaataaagtaagaaaggtaaactaaatactatctcgcgagctaggatagtctaggctgtactagactttactaaggcgttatactggttttgcagttatatactataggggtagcctaataatagaaatagtaactaggctataagaggccttaacgaggctctaagttcgtttttaggaagtagattactttatatatatatatagagatatatattattatagtagcctatatatcgctttttattataagaggttagggtaaataaaatatatatatatatatatataccctatacctcctatcggtagcggtagtacagtggtaagtaccctgaaggcaacctataggataataaattggtcacttgttattctatagggcttaggttcaattcctaataccagtatatcaattactactattatatctctttggagagacctataacctaggggtagtggagtaccctagcctttttataggttaaagtggagacaatcataggccttactaggtaaggctcaaagttcaccgtttaggaagtttagaacaatctcagtggataaatcatcatatatttataaaaagtagtggtagcctacatatcgcttcattgcgaggggtcagggaaataaaacacatacacacacacacacacacaccctgtacctcccaggagccggtggaccgcttcctaggagcatcaaggttatgtcctgggagccctatagctactacgagtacgccatcacgatcccaggagcctgcaatactataccaagtggacgatcctatttcgacaatggcgccagcagtacatgaacatatttagaatgtgtttaaaaaaaagtattgtattcgagtgctcgagtaattgtgaccttcattcgttttgacacaactaattgcagcctggtttgaactaatggcactctgaatgctgttctgagtctcgctaactctcgggtaaactaacttccgaatagcccatggccagtaatgtatttgctgttttgttccaccgtcgacaaatgtttgacttgtctggatcaaagccattgccctggcttgatcctgaaaatatgcagggaactgtcaagaagataacaaggctcccagggacactgcagatggctctagggatagatccccggctctaggcatgaaattgcgagccctagcagcgttctctacaaggaccgaacaaaagaatcggcaaagggagatctattttccttttgtccgttctggccccagggctcggaatggcgcggagcgctgtccttgcaagcaggttagaaaaattttctgtcagagagctggggggtgcgagactaataggaaacgcacggacctatggtccagatggaaaatgtgtttttgttaaaccaatgccattctatcaatcctacttccagagagaggacgctgtttaaactagcaccttctcaccactacctgcgccctcatattttgaactgtagtctatattgctctctcaacatatccgtttcctatattcgttgaaatcacaatgagggctctttccagacccccttcgttcaatttcagtagaggcatgaccaaggaagaatcccaatggaggcttatcattgaggccaattggtcgaataaggcgccccctgccccctgttcaactagaaacatacagctcatttaccccgctcgttctgagtttcgccgctctttccccctgtgtcggagtaacgaggaacagtctcgcgtcggcccggttccgttcacggcccgggcgatcatcagcaccacacataagtttgtcagataagctatctccatgatggacaccaaggatcgaagggaaagtagtcacttttagtacatagttcatctactggctcattgcatttcaatggctgacactaaattgccagtcactgcacagatgacgtgttccggccgctttgcaggacagctcatacttgcatttccctgctcctccccactcccggctatatcagatgtagtcatgcctcctctctcgtttatctttcataaaattcttgtgatatctttagggatcacttcatagccagcaaagttacagtaatgccaagaaatggcaaagaagaaaacgaaacagcgtaaggccaatgagctgcctgggcgacccctcaccccagatatttctcccaagattgactatcaccggccttcatcatcgtgagtgttttgatagcattcaaatgacgttgtctaacctattcactggtgctacgaatcccctttggttaccctcattattgggagcaagcgatatggcattccggctcagttccttcggagtcaccaaaagttcgcccctatatttcttggtttatcagattttatcatgtctaatgttaataaagacatcgggcataccgtggtacatttcttatacacaggtggctacaagacagtcagttcacctcttggcgaaggcacatcagatctcgctagagagtacaagaggagcgttctagtctaccatgcgtcaaggacttagggccttactaatctagaagttcttgctcagcaaaagatgcagcatttagacgaggaacttccaattcttgaaatcttacgggtcgtgaggggggtgttctcaagcctccccccaggtaaagcctggcttccaggctacattcaaggaaatttgcagcatttacttaagccaaatgatccagggcttggtttacgtgagttttacgatattattggtcaagatcatgagtttaacaatgcggtgataaaaatggttcttgagatactatctcttcgcatatgttctatgaaagatcagcacggtaattcatcttcaacaaattaagtataaggttaccaagctgaaccagtcttcttgctacgtttttagtgaaaacaccgaatggcatcatctcaaataagtctcatctttcggggcttatccatgaagagcctgagcctgtcccagaggagcctgagcctgtccccgaagagcctaagcctgtccccgaagagcctgagcctgtccccgaagagcctgagcctgtccccgaagagactgagcctgttcccgaaggcctctctattgacagtgatggtagactttggacgattccccgagtgcctgctgaggttgatgactggccgcgcgcttcttcgttgcgcggagctacgccaaatgccgaaatactccaagaatctattgatcagggccacataacgaggatttcatgctcggacttgactttgtatgaaaattgggaaagtttgtcttcaaagagaagagctaaaagggctagcaagcttaggtctcgaggccttcctgttccaagcgagactggtttcatttctatagttgcagtttgagagcagcttcaacaaggcaattaaaccgtttacttcctattcatgaattcgtaaagtgccaaaaggatgtatattgatctataggcatagaggttggatttggggaaaattgggggtttttcgctttctagtttaatggagggcgacaacgatccctagcggctcgtacctctccgacgaccctcttatatgattggttcgatgttactcctttctccactttggagaggctcggtctccccagcaagtcaggacagaccagcgagtccgggtaggcaatggatgatagagggtgataactagacctaattgagctaataaagccgtctttctcaccgaaaaagagctgttcagacggaggtctatatcgtagggatcatcgtgatggctcctaccaaagatcttagggatcaggagttcaagggaacgtttacggagtacaaccatgatatcctatgaaatgtacctttgttttgcgccttttgcatcggcgaaacggtgacgatcaacagagacgccaacgagtgccccactgaagctagtgaatattctaccaataaaatattcagtcgagggaattttgtgacaggtatatttttttttcactccagaacatatccccgaattgtcaatctacaactacgccgttctgcggaaaaggaaaattgttctgccgaagtcatgattagctgacataagccaactataccgagccgatctgagagggtcccatcagctttattccctcatccaacaaataatctcatcaaaggcattcacttatcattaagcaacccttaggaatccacccaagccaaaatgacaaaattctctccaaaaaatcttcccgatgagtcgatgcgagagatgaactttctcgactcttccttcttcaaagagcccagcaaaagccttccgacaccagcgcaagtgagggctttgtcgaaagacatccacgcgaacccacagccgcagcctgttatttttgaagagtccaaagtcttcgtcaagtttggcccctatgtcacgatcgcagaagcgcagtgcctttggatgatcaaacgaacctttggtgacgaaattccagttcccgaagtttttgggtggcgggtcgacgaggagaactatgtgttcctctatatggagcttatccaaggacagacgctgcaggatggctggaatgagctcaatagccaggacaaaagctcgctctgcgatgagttatgtcaaatagtcaaccgtctgcgccgatttgaacaagatccttccgatcagtatattggtacgccccggtcaaaatgtgaaggttattatttacatctaatcgaatgtttccaggttccctggggcaccagcaactcctggattatgtttttcaatcatacccgaaaactgggcctttcttcaccatcaaggatttcaacgactggttttcctacttaccacaatcgtggcttcctccttcgaagaaatacaacgacccctataggtgtttgttaccggacagtggggtcattaaatttactcatggcgacctccaccgagggaacatcatcatctcttccagcaaaccagctcgaatcattgctatcgtggactgggcccaagcgggatggtatccagactactgggagtactgtaaggcactctacacttgttggtacgaggacgagtggcggcgagactgggtcgacaactttctaagtccacgcttacgagaatttgaggtcttcgcagagtacacaatggcaatgggctctgtgtgaaccagttctacctggaagtgaacgctactcaccgataggagaagtaagcatacttcgcagaaattacaaaacggcaggagaacgcacgtacgtacgtattataacaactggtcgcttggatctctgttctgaaatacttaaaatagaccattgaaaaaataaatataaaaacggatccaccttgatgttagcacaccacgagtgaggagccaaggtgtgggatcctctgcggtgaaaccgaataagccgagtagtttagcgagataaaatgtattggccagctatgtccttagataatcaaagggatatgcaacaaaagaacgtatgcgccaagctgcatctaacttcgccacaggccgtcttccgtcaactgctcgtacttaaagccaactcaggatgaattcaacgtcttccggcgggctgaagaccgattccatggtttgggggatcacgtttggattgaacaatctgaatcgcttccgctgtaatgagacttttcgagactaaatggcggacaaagtccatggtccattcctgacatcgcttattggtggtctgaagcagataaacaataagcacggaaaagtaagcattagtcaaattaggggacttacatcattgacaggtgccatgaagttctgactgatcccaggagtcgggacctgagacgcagcaatctcaatgttgcctctgggagttgagtctttggtcatcgctgtgtccacggagtcaacgatattggacgaataaacttggccaatcggaaaagtctcatggtgctgttgggtcatagcaggggagtagttccgtttgaactcgaggatgtagcccgccatgggtgcaccgacggcgtggatcagagtgcctcgtttagggtctgctgccgatggaacaaaaattgcaaagtgagctcgttgagatgaactattgcgaaaagagatgaggtgaatagttctggtggccatgatgttgtgaggtcctttttctttgcttgggtggagagggaacaatataatatggacatgagatgtagtaaaaatgcccaagaaaagaacaaggtctctcctcttatatctttcgatcatagcacgtcttaggaataattaggagtcccaagcaaccctaccaggcgcttcgaaggggagctaggcatcatcttcgtttcatatgcacgaataatattcgttctgagcgttatgttgattcccgagcgctgggattcatttttttttggcgccgcagagttggggcggcaatgctggaactttgagtcgtcggctatctttagatgaaaagtgctattgcaattcttgtggttgcttcggcgtttatcttggcaagtgattgaaggtagctgatacaaaactcgttggctaatctctggctttgtccaaattgggtgcctctatctaacaccaacaccctacactaaagcgggaaagcaaactaaatgaccaccattggccaaaagaaaagatgtcccagttgagcgactctttagtttggtactgagacggtaagttatcagattggggtaaaagtttattgagtaattaccgcatctttttcaagttaccgatgttgaatcagcttgcgcaatgtacccacaaaaatctggagcgttagtgaccgtgagaatgatccacacgagagaaatggcataaaataaaaggaccactagcggaaagcgtatggcgtcaatgaagtggataagaactttgcaaataaagcgcctccatctagtggcggctatgtgactgttcctattgcgccgagatgagtcaatcaaccacctcggcatacaaccacacaattgaatgatttgcccggaattttcaagacgaagatgaattggtacatgtggagtcagaagcgtttccatcgtgggtgttacgcttagatatctatcaccaaagaccaatagttggcattcatcatcctccgatttgaaacgggcgctaaagcaatcaatgaaaaaccactataccattcaaatttataataaaatcaacaagacccctgcttatccatgcgcaccgcgcgcgtaaatttgtttgagttattcgttttctgcttacatgtttgggcttcgtgggagcggagattgcctgatttcacgacgagattgttgtcgactcggataaccgtgcgaccgaacaacgaatgaagggtcgttctttcttgatcattcattgggttcattttcagaatatcggcgtattctgttgcatatcagaaattttgaaaattgagcagatctatgcggtaaaaagcgaatgaacggccggccggagaatttaagttcgaagcgctggcaggctggaagaggggaaattccatacgggaaaatgatgatccgacaaacgtccacccgtttcatcgtacgctcacaacggagtctcctgagcttcctttccaccataggtgacattatggcgaaaggccagcctcacatgcgggcgctccaaagcgacgcagggataacagatccccgtctgtcttgttggaatgaagagctaatcgatggttgtctagcactcaggcacaaatcctgggagcatgtcgctcgaagactaagaatagctgtgtacctttgtggatcatattagaaacgccgatactatagtagctaaggatcctgtcatttatacacatgtatgtaaaaagcagaggcgaccgggtttaagtaaaaccggtagaggcgcggttcatcacgtgaatcttcgcattgttttctcttattcctaccgcttttccggcgatcatgatgcccttttggattctaaaaagcatgggtttgttgtgctatatccctattcggatgtgaccgtctaatggatagaaaattgggttagatcaactgactccttcgcactatcattctcctcggagataaaatgtcctgtactttatcgcccaaggggtgcgaattaggtaaaaaccccactttgttaggcctaaaaatccaacgtcatattccgtgccccgcggttactttttaccacgctccaatttccctgcgaaagcgaacattcgatgccaaaggtgagttaggttgcaaaaatcgtttgctcatgtgctcatctaacttatttctagtggatgatttttcaccatctacattaggtcgtccactccatcctcacgcgtcccgcgagacctgatcggcctcctgttcggcatgactcaatcaatcatggatgagttggctacctttctcaaaagtgctagctggaaaaaggacaaggacaacctaaatgtttttttttgtgatgatgatggcctagagccgttgttagtgaaggcttccagcgagttgcctgattatcttcagcggcacgggtttcaagtgtggaaggtgttggaggaaactaagttcgtggaaaaggaggggattggaaagcaaggatacatcataccagtgacgattatctccggccaccctcgtttactatctgagccttcccagcctctgcttgttcccaataccccggcagtttttcaacgcgaacctgtcctatcaccagccttgtatcttattctcgctcttccaccgacttctacataacacaatgtgcggaattataaaatttgcagtattggctgagagttcgatcaactaaggtattgagatgggtcgcagggaaacattagagggtaatccgcgggagtgacggttcgttgttgatatggaaatagttgagggtaatctgcaggtatcgaggtggatgttgctgcgaaagcttgaggaaagtctgccggtgtaatcattgctatttggttgttcgtagcgctcattgggtcggaaaattgcttgtgaaaaatgagagtttatctttgacctgagggctaggaatggtgacttacaacttgaacatttcgctccatattgaattgggcactgttttccactgccgtatttccaaaatggggtatgagtgtttcacatgatcccgatttcgttggcatgtacacgggttcaagcccatgggtgtgaacttgtgacgtcataatgtccggccgattttgcaatgatatttgtgtgagcgaaggctcataatgtaagtcgctcacatcttgcaccatttccgaattctcttgaccactaaacatggcgttacatggtgatcccacagtggaagcaacctgtgtagcaactggtgctccagattgagaagacggggtccctgaattgatatgagaaaaagtcgccaacattttacaggacataccggcgctaggctgacgaatttgggggatatccgattgtggccaagtcctataagactgtcggttttcatccacaatatgggcatttgcctctgatagctgactctccatcactcgttctaatgaggctttgatcggccccagaacctttgcagcctcgtcctctgccaaggcatgaagaccacgtgtctgagcttcttctggcaatcctttctgcctcagatggttcaacatggcaattcttctaggcctcttcggcgatttgggcagctctttggtccagctacagcgttgtcagtgaagttacttctttctccattagattgccacttacatcgactcaccaccatcttgtggaaggagatacaatacccccagccctccaaggtcattagctagcagactgtatcgctctcctaggccaacccagtgtcttacgcgacgttcaatgtcggaaagtgagtcttcacagcccgaatctcttatcagatgggctatgaacattgaagcatcatcgtattggtactgggtacctggctgtacggcattcttcaagcgaaagaacgccacatagcaaatccggaggcggattttccccagttgctgttgattttcgcataagacgacgagtttgtagaaatcggcgagcggacagggttgcagcgaagttgggacatggcaagagaaaggcgcaatttgacgagtgcttgaagaaccatcgctgctcttttcgctgcttgttggtaagtacaaggggaaaagcgattcacgcttgtcctgcaggtcttggacgatttgtggagcttggagttgttgtgaggaacgcacgatggccttcttgatagcggactgacgagaagtttgtcggatacgctggggaatgtgcttgtatatgctttttgatgctttgacgttttcctgcttagatgaggattaaagcttcagataaatgatcgaaggaaactcacaatatctctccagaactcagactcgtctagttgatgttttccctcttctgcagccttattgcaagcagaaagaagactgtttgccaataatctgctttccacgatgcccatggtggttgctgaagttggaagtgaatagttgggacgacgtaagaattagtgggtacatgtggagtggtgggaggaggaaattgctggcagccgatcgaccgatcacaagatcgtactttttgccaggggaatgctgatcttacctcagcggtttggagtactacattcacaggcttgacccgattctgaataggttttctgcgcagaaaacctattcagaatcgggtcaagccccccacttcgtctcttgtcatcaccaacctgcactcatcctccaattgtcgccatgggtacatctaggcattttgaatcacttgcatggtatttggaacacactgctcttgatatgtctcttaaaacaaagaaagcagtatgtccagaacaaaaccgcttcgcgcctatcacgatggatctagtatcttatccccaaaaccaaaagagctgaatttacttcattcgacatcaattgccattctataattcaatttcatttggcctcgatttcaagaaaaaaagatttaccaccccttactcaaatacagacggttaaatgcatgggcttaccaaacagcctccttcccttcaacatttgcaggtccgacctcaggtatgctcgactttgagaccatctgatccaactatgaagacatgtgagtctggctccagaacttccagatcagcttttcaactaggagtacatgacacgaatgaccatacctacattttggggcatacataaaaagagacaattgcttcacacttggccaaatttctatatttacctaccaccaagactccaaaactgagaatatgacatgttcaaaatttcgatatttgctttcaaagtacatgtcccgcctcttctccccaggcagctcgcgcgagacagacttattcggggggccagaccccaatcgaagaagtatgcatgaatctgcgaaaggcgccaagcctttgacggtgaaagaacaacctgctttttctgcccctccaggctctggactttttgccaaagactcaataccgattcgcttgcatgtaagtttcccttttctccgggttaataccgagctctaaccaaacaagaccgtgcgaatttggtttcctcgcaatggagttcaacttatggaagatatcaaaagaaagggcctcggagatgtggttcttgatgccatcgctcttcatgatattggcgtccagcaccaagcccgggatggccatgacaacatgaaggatgcatatttattggaccttgcggtgctggagacgggtatatcacgggtttgggggaaatatgggattccagaattcattcctttgagcagcgatgatccaatcattttgcaacaaccagtcgaagaccttgactcgaaaaaagctctttgttaccagcgtctacattcaaaatgcttacgggagtatgaaaaaaggcagcagctcgcagaagctttgggatatgtgatgcaagggaacttaagggactggtatgatggctatctccaagacattggtggccgtctgaaaaagcttggataccgttgattaaatacatataaatcccttcatgctatgcaatttctctgatcaccagataggctcaattcaggacaagcaaaaagtcgaagttcgaaggggccgtctcacgcataatgcttgagtagcgaccttggagtattctcctcacttcattgtcgtgaggctgcctcaagaaagcaatcaagccccgcgacgcttcagaagacgaagcatcaaaatgccaggtcatcagtgctagcattagaacagtactgtaactgagaccgtggcgatgcaagggaccttaagggactggtatgatggctatctccaagacattggtaaccgtctgaaagagcttggataccgttgattaaatacatataaacccattcatgctatgcaatttctctgatcaccagatagactcaattcaggacaagcaaaaagtcgaagttcgaaggggccgtctcacgcataatgcttgagtatcgaccttggagtattctcctcacttcattatcgtaaggttgtctcaagaaagcaatcaagccccacgacgcttcagaagacgaagcatcgaaatgccaggtcatcagtactagcattagaacagtactataactgagactgtgcaaaacattcccctcgaaggcgcgcaagccttcctcaagagaaatgttctcatccagatacgtttcccgagacctgctgttcctcaaagccttgcaggcgtctagcagcattctagcatcttggctggagttttcggaaggtgtccatttcaagagtaccggggaatcaattctcaaaaagatcattgcctctagagcgacttttgccggtccatacaagaattggacaggaatcggggcaggcttatgatgtgagtatatcatcgccacgggtcaaaggcacggatactcaccatgactaaatcttttttttcaatcaaaatttatgatagatagcttccttcgacagtagaaaggagtctttatatgaccacctggatgtgttaaaagaacaccagcccatgcttaaagccttccgttcctattgatgattttaccatacttatcgaaagtcaaagctgtacgtcaatttggcctcatgtcttgcctttctgctgtctccttgcgattgtttcttccaaattggatagagtctatttggagaccagaagacgagcaagaaacagaccagggcctagagccaacgatcctaaatgctgccagcccgtacaagcgaactgaacacgcggtatatgggctggaacatgaaaagtctgcatctagccccgaaaggtctctaccagtatgtctccaaaagcaaatagagactagaagagctctacgcatcggtccatctggaaatcgtcctagtgagttttctcgtgacgcgcagggcccttgatattgccttctcactcttcatccctcagaaaacagattcccaaacacctctatgcaatcagattgcaactcggacagagaaattattgagctccctcacattcctccgaacattagacttgtcaaaggcagaattattgacgtggtaacggggaacagtggttttccgaaagtccaatcacatatttgataaaaggctatccttgaagatggtgccaaatgtaagtcaaatgaccaagcctccacaagattcactctcgttttacttcattctcacgctggttgacttttgatgtttgatggcttctaggcatttacatattggccgaactgaaggaatttcggatggtttgcggcaaagttctccaggccaaaaaggttttatctgattcaagtttcatagtgctctctcgagttgccgctttccagctaagagtaaaattccccagtcgggtaaacttatgaaaacaagtggtataatccttggagcttatgtttgggaatatggagagcctggaagatacagatattgaaagccaagaaatagttcaatatcgacagaaatatctttagataacatcgaggttgggatacaattgcgtggctaaaaaaagcgtccaggaagcaccaaaaacgtatagcaatgtacaagatgaaatagctgacaaatcggtaatttttgcacataaatttctgctagctactctctggctttgctaattttatggatcccaatcccagtgagtaatatgaaggagtaaaaagcaatgaaatgcgaatgtgtcggattgattggttgtaacactgcgaaaattcatacagtgcgtctgaggtttcacacctagcctagagaaataggctcttcgtagagtaaagttcaactttttgcatgtcctttatcataaaagcaatccaacagtggccctatggttagtttgctatataaaaagctctcatcgctaccaaatgctttcaatcacatctaaagacccaaaatcaactttcattatttccctacctaaagatgaatccttcatcttcagccatttgctcgcccttcgctctccaaaacataatcaaagttcggtatagtgttatacagatgattttaatactaaactatcttttcattgcatcttcaaccctcgaggatgaagctgagcttcggcgcgtcatcacaaggggagaaaagcaatgggaggctggctttgtgcctgggagctttaatcatatgcaagtgaagggttggtggatgaaagctcgaaaccttctcacagaagcgggatgccttcgtgcgttctcagtggaggatttgaaagcccacctcggatatatgctcttcatccttggcgaagtttcacttcaatcgtcttgctccgggttcatgctatggcggcggcaaaatccttctaaaagaccgtttgggagtagagcaagtatagctctcatttgctacagcttttcgggaataaccaatatcagtgactatcaatcggtcgatccatggttatttgacatgggctttgttaatgatatgctccgccgtcttcaaaagtcacccttattcgatgacaacattcggttagacgaactcaaaattgtgctcacaaaccttgaagcgattttgtctatggaagatgagcggtcagctttgattcaacctcatcccatcgacatcaacgatactattcaaatacaagcttattttgcgacagcatttcgtgcacttgaaccaagcatactattgcaaattttgccgaaatggagaaaagtttggattcgatccagaaaaaacagcaaagacgatttgccccgcctggtcatggaaccaatgacttacggtaggaagcaggacgtctttcattttcctgatgccgctttctgacattgacagatatgagagtgcaacatattgccaacatctttcaagaagtctcatccctgaatgcattagggcaagagacaaagcaggtgaagctgttagaaagatccaagcccgatagaatgatacttggtgagatatttcaaatcagaagcatccagcaaagatgcgagaatatgcacctaggttggccgacctgtaccgacgtaacatgacatgaactaacatggtgcagccgaaccagtggtagtccatattgtccaggtctcgccgaatccgtaaggtgttcgagccaacgcgctttaagacggcgggcatttgacaggaagagaagggatatctcgagtgaggctcagtctactattgagtccccatttacccatagtacaattgagaataaaggacctttgggtcatccgtttgactcttttcatcgaaataggggacgcagagacaaaaggctttgccctctcaaacttattgattggctccaagtaattcattactttactatccatgcttcataaatccccttttggcgctaaccgccgactgatgtaaaacctgggcatggacatgtaaattccaattccgagaagacaacgcaatgtcatcgccttcatcttcgggttgatcatctggcccctgtccattgactttgccgaattaattccagctgactaattcaccgcagctgaaatccagagctacctcttaggtttcaaggatgaacctgacgtggctgttaaaagggctgccgagtgggtaaatgagacaatgagggtagaactgtgcagtagtgaaatttgagagagctgcggttggccatcggttcgaacgaggggggtcatgccttgacaacagtgcgccagagctcggctgacggactggtccgatcagctttctgccagcaggtcccgtctccagaaattctgaagcctcacatttccggcagatttagtaacccaaagcggttagcgcttatctttatactagtcagagtagcgcctttccgaatcagtttttagtaatactgcagagttcctactattattcctataatactaacttatatgccactttttaaggactatagtcttcttattagaaactacgatagtataggattagtgcttaaagctctaagagataggtatcctcgtatactctattaaagaggctcgtttacactactttatatatataatatatatcggatacctcgactttctacttatataaattatatttaaatatcctctattataattatatcttcaatttaatatataagtaagttaaatagattatcccttaagtttaaactaagggtagtatcttaagcttagaaagctatatagctttaggatataatataaataggagatttaggtaatttaataagaaataaagatttttataaagatctgtatttaattagaataatataatatataatatagcttaggttactagcttctagtcctttagtagataaaagtatacctagagatataaaaagttgaggtattttatagatatattagagttatcttctttaaatataagctatattactatcttaagtttagagagaggtagtttttattaaattagaatagtagtaaagtagaaagctaagaggaagcgatagcttaaagagtataagaaagcagagagaccgatatactaaagaaacctatataatatactattactaaagtaatactatagtaagaagagtatataaataaattactaatagtaagataatatattatattataagatatatactatttattccctttctttctatcttattctattagctatagtctaaacctatatttcctaatatagattagtagttcctatataactaaaaatagcggtagcctaatatctctcccttccctaatatctcctagttagagcttatacctactatataactagctatagaggaaaccttttagtctttaatagtagagaaaatctagaagctactagtaatatatagaattagtaactatagtaataagtctattaggtaatatatacttagtatttctaactttagtaagcccctaaactactattagaataactttctactaatatatataatctactaaataagatagtaggtaggaataatagatttactacctcttcctcctattcctataactagtctagcttctaaaataaagtatagctcttatcagttcctccctatacctaaaaaacgaagtagagtagaatatatagggctagatatactatcttataaaaagaaaaggaagaataaagttaagataaaagataagactactcttaaagtaatagtataagggataaataatactatactacctttaggaggtatactaactaattccctattaactaataaagtgaatatagtaataaacttacccttagttatagtacctttaactaacttatataactactaaggtagaaaagtactataaagtattattaaaaatatacttattaactatattaaacttaataatctacttagaagatatagatactatttaaagtaggtaattataataataaaggttaaagcgatttaaagttttataaataatattattaagttataataccctaatatagtctagttaattaagtaggagaatatattcttagtaagtaatagtatctagtcttaatttaataagactatatattaggaaattattaaaaaaggtactaagctccttaatctaaaggatttactaatatctaaaggcccttttaataaatttataatagttaagaaggttactactaagcgctttatataggaagtaggttatagacttagccttactaattaatagtagtactattttttttagaaataactattcgagatatagaatataggtattaataaaattctcttatattatataaaggaatttaactacttctataaaagctacttattagaatctagggcttctttagtagagatagtctagaactaggaagaaagatataccttctatattaaatagttagaagagtatataactaaggaaagtaagggtaattttataggaagactatagctaaactagctacttataatagatagacttagtattcctaaaaatatatagaatagtactattaacctatagttctctagtatagaggaaactatattctaattaagtagattatataagctattagctattatatttagtagattctttaatttatagttaaaggtagaaataatatagaataagtctatttttattactctttaacctaaaggtaatatctttcttatagtttacccctttattttagtctaaaaaggagatacccttaggttatttattagagtaatttagtactttttagaatatagtattatctatagtatacctagtcctaaagaaaacctttagctagactactctatagtaactagggtactaaaccttataaaggtattagttcctagaggtaactttaatatttatctttagtaagagcttattaatagatagagtaaaggatatcttatataaaaggtctcggttattactctttaggtaatttaactatttaaagaaattatttatactattctttaaaaagtataatatttcctatactaatcgctaacttatataaagtgtagttatataaaaagccgaagttcctaattcttattttttatttatatctagtatctagtttaatatattctaaaatactatttactagtattatctattattatagagtaaaggtatatatatttagcggctattatagttatactagttagtataaaaggtatctaaaatttagactactaaggatactttatattagcttagatataagacttttatatatcctaaggctaagttatactaataagttaatagatagtagggataaggaggggtatattttataagagggatagatatatattatcctagtcgatattatatagcctatctagtagtctaaataggttccgcctattaggtaagtaaatctttatatctattaagaactatctcttaaatagactagttattagatataagtactttagaactattactatagataactataataattattatccttacttttagagaatatactataaaataagtaggaaaagagaaggagaaagagattagggatatataaactaagggttataaaatgatttaactagggccctactaagttagattagatataaagaataacagctattataatatattaataaagtatatactatagttatactttaatagagtagctataacttagtagattaaatatttacttttttttttatacttataagactattctaaactatagctaactaggctaagtatagatttatattttagtctactttagaagttaacttttattataagggattagggtaactaaaatatataccttatacttctaataaagtataagagactatatactataagtatagtttaaatatataattaattaggttctttatagatactataaaaaaactatctctaataatatagcttaattcctatattataccagcctttttatagttagtattacctaaaataaacttagtttataataaagtctattagagtaagttatattagatataagtccttactattctaataataatatatttatagattatttatatttaaataagaaactctaagtagaatatatagaaatactaactacttttagcttattatatcctatattagtccctcttatttatagttaataataaagttagactattatagcttttcgctataaaattacttaaagaaagattttagaaacctctattactctatatccttaaataaactagtaagtaactaaagtaattatttatagacttaaaaataagtggtactataaaaggtaatttaggaaattagttaagctaaagtctagttaatataatataatcggcttctcttatactattatttagagtactattagtctaaattaggttactagaataataaagatatttttagggacctataataaacttatatattactttataagggttaatataaataaatactactactactactataataaacttaatagttaatatagtaatagctattaaataaatattatataattagaataaaataagtataagtaagatatataagtaaaaaatccctaatctctatttattacttactttataattactaataatagtaggataaaactctatagataagtataaggattacttttctaactaaattataaaggctatagctatcttttatctaaaaaagaggtactatttagttgcttattattataagtaataaacttctacctagagtaggtcgataacctctagggaataattaaactagttaatatttaactagctttatactctactattatataaagcttctataaactttataactaggttatctaagttaataggttataattactatcttttattagtaagatatatagaaatatagttagaatatttatatcttaagtaacctagttttagtaatttaggactatattatctcttaagaaaggaaaaggcttctaattattatctttaagattaattagattaaactctatcttatatctctactaagtatattagattaaaagctaaaagttagctactttttatataatcctctctatatttatatagattaaattatactaagtttctaagagtattttctatagatataataatatattatagactattatctaaacccttatttagagaagactctctttagtattaagactaagtaagagaagaatatatcggtaaaaactttccttcttagtattattcttagtaaggtaactaaggattctatagattttagaatctttaggtaaaatataattaggctaaaagatatttttataaatttcctttaaaagaatagctaaggttatagctaggtatatccctttagctttagggaagtttaagggtattatagggatatattactaagaaaacctagtattctctttttaaagcctttcttagataaatatatcttttaggataaataaataagtagataagttatagaaagggctagatatatatatacctttaagatcttttctataagatcctcctttaagatagtagttatcttatttagagtaaaaatctaaagatctaaaaagtttattaaactaggtaaaatatattagtatataaatatcgctaaatacctatatataacttatatcgagcttttattaagctctaattatagaatagtaaagctttcgatattttagagttagccttagcttatttataattctttatttagtatagctttcttagcttttaactcttctattttctactatattaataaaagcattattttaagacttaatctaatagtttttattttattaataatcttatctttctcttttaaattctattaaagtatactaatatctttagctaattaagaaactttactaagctctaataagtaggataacttaagattatctatctactactagagctcttatacttacttagagtatttagtaaaagattagtccttctatttaactaatatataaagtaaattaacttaactaagagcttctttttactttaccttttccctcttattagctataaatatctccttaatagtaacttactttctttcctttagattaaagatcttattttaggctttccttaactccttatttctagtaaaaacctatttatactaatagctaaattctttaattataactaatatagcttaggacttagggcttaaagctagtatattaatttacttaagaaagctctaaaggctatcgctattaaaggttaaaggtataatatactagcttatacttaaatagctttaaatactagaagaagatataataaaaagactttattaggctataagtatttataggtttactaatatataaaacgaatttttagtctaataagagggtcttctatatttataagtttctaaaagagctataaagagatactatatagctattttatagatatttagattatatctagagattgtaattaagtactatatataaataggtactttctaaatatataaagggaggtttataagccctattattataagtataatagaagtaatactagtttatatatataaaagtagggctagaatataatatattcttaaccctataggcttaatatatataagtaattatatatatatttcttatacctatatatagctatatatagcctagaatatagttaccttattagagtaagtctaattctactataagttaagatagttagaatatagagtaaagattatagtattagtataacttaggaaaaataagtttaagttctctattcttacctaaaatcttagaatagagcagaggtactagtaagtaggttaaaataatttttagttagtaagctagggatataaatagattataaaatatatagacctatactttagatagggaaggggcccttagtttactactatactttaactactactttatataccctcttaactagtaggtaaacttacagctagttattaaattataagttacttagaaatgtaagatagaaagaaaattcttagggaaaaaaaaatcaattcgtttatatcctatttaaattatataatacttaacctagacttagatcctaagtagataactatatataaattcttaggctaataaatatagttaaaagaaacctaaacggctatataaataatatgatttagatagcttacttaatcgaataagaataaggtctatagtggtaagaactaagggttaacagtaagtaaacttatagctgttaattaaataatcggttatcttaggaaaaatgcattccttttaaataaccgaaagtatttattaaatatcattaggtagatagcagtctctactctaaatcagtatatttcccctaatacctaggcaacccctaaggtctagagcaaaaaattaatttcactcaggttagagatatcctatataagtctagtaataagcctatttctactatattttctaggctttatataccttatcgatttatagtagttagtccttaaacctttacgaacacttcttatttatttatatacaggcttttctatactatacctctagaagctactttaactatactatacttaaattatatatactttaagctaactatataggctatctacttttccctattaggcctacgagtagttataaataacttatatataagaatatactgtaaactcttaagtatagagattctatagtactttagaactataagttattatactttatataccctcggggccttagtaatttctaatttatagcctaaaaatattatatataagatattaattacaaatattctggtctagtataagttgccctttagttatataactttatatatattattctagtatatctttatcgagctcctctagaccctagtctattactaatatagggaatagatagtaggaattcttaaaaggttagttatctttttattaaaggtatagttagaaatatactagttataagctaaggaatacctaaaatcccgaagtatctactaataagataaatacttagccggtttcttaaaggtatattcctatatagatatctatattatatatcttactatatttatacacttttttttattaagcttaatttataataaccttgtttttagtatatagactttttaatagattaagatcgattagaataggtaggtagtatagaagctatactaagagattccttaaagtactgctattagaaataactaaggagattagggaactaaatatatagattaagtagtttttagagattctagaaatctttaaatagctatagttttaaagaattaaaaactagtattactctctagaaaccgtggtttttagaattatagcctatatagacctaaaactatccttagtaagtttattaatatagctatatcgatatctactatactaaaaactggttaatttctctaaagtttaaggagctagttaataatattatagtaatatattaagctaaggcctagttatactagaaattcagtttagagctaaccgatatatatataaatattagaagaattagttaactataggtataaataagataactattatcttcttattactaaagaaaaataaatccttattttattatatgattttataactagtatctcttaaatttaggaaagatttaataaaacttctatacttagatttctaagctaatttatttacccttaatattttactagtatattcttactactcctagctattctttagtattttattaattattattttactattattaaaaatatataaaccctaccttccgatttattacctattaatattataactctataaacatttttttttctagtatatatattttatatataatcttaactcgtttagggagtaccagtatattcctaagaacactagtctatccctaggaatactaactctacctttaagaatactaactctatttctaggatcactaggacgtccctaggatcactagtatatccctaggaacactagtctatccctaagaatactaagtctacctttaggagtactaactctatctctaggaatataagtccatcccttagatcactactatatccctaggattacctctctattcctaagggaagttttatagataaataatcaatattaagagatataatagtcgactctagataaataatattatataaggaagtaaaaggaatatagcttccttatatttatagggaacctagttatatagtcccgcgtagattatatttctatctatcttatatatactatataatctagagagtatatactataatatatattatataggtaatctagtaataagtatataatatatatatatacccctatagtctatataggtactatttttttacctatactacctcagggtttatataagcgactagttatataactagacttaagagtctatagaatatcttagtaggcctactctctaataagtagatagctaaaaatttgccacagtaataaggtaaagataggtatacagtgatataatatcaggtattagcaatcggctaagaacaatcttataagaatagggtgaaaaattctcgctagtagatatagggggtggtagggtattagggaatatacagatattaaaataagtagagatagataagctaattaaatctaataaatactacctcccttttatactaaggtagtaatcgattaaacaaaatagtttcctcaaataagtaaaaacgttttttcgaggttattgtatataacagttattatatatctaatatacccgatttctatagtaatatttcttaaaagttatccgttttcttactctcctataataagagctcgaatactttaaatcggcctataacgctatcgataataagcagcctcttaattttctatcgctaccgtacttaattgcgtttatatatctttttttagtctaaatctagctagctgtttctttaattaaactacgatatattgagttagggagctatatttatcgctcctaggatcatgctcacagcctctaggagcttaatatcctctaggaactattatgataggtcgtggaagtgagacgctggattgttcctaggctctctaccttagatcctagagctatacccgtccgtttacaggagcgctgattacttcggggagcaattgttttactacccgcacttattacctgcgttttagatcctacttattattttgaagactcacactcctagggttatatccggccctagaatccgtagtatggctcctaggcacgcttttggtcgctcctaggagtcagactcataggtcccagaggacctacaactcctgggagtgaactggacagccttgggaactagagtgtgtcccctgggctatcgatgccagtggatcattggggtcacccgcacgttttacatttggtcctggacccttgggtaagaatcctgggatcacgaagtctccccagaattaaaaaatcattcccagaggtagggtatcagaaatagaggaatataaatctagatactaggaacaaccaggactaggaataatttatgtctttccaggaaattgcaaagaagttgttagagattgagtatatatggtagtataggtatttggttgctaaccaaacgctgtatcttcttagccagctagcgtagtggtataaccaaagcacccacaatccgttacagaaggtggcctatataggaatacctcggagagtagggactcactgtagggactaaggatcgagtggtaaagaagaaggaactcttacggatagtatctcgagtattagaccaggtagaggttgaaatagatcctaagcgatcataagatactccttttagatcctaaattggcctatatggcttatgataaaagcgtactgtagataagatacggatactagaagtggaaaaatgaaagaacatagacaaacgacaagttttaggtagcccattccaagagaaagaatggcttggaaggcagaaaataagagatttctttcgagagggcttagcttataagagaatcttcttaagaggaaatcagtcacagtaaggttagctaaagagcacagacgatatagaaagctatacgttatataaactggctcttcttcctacccctctcctagtccaaacattctaggtcttaactagtcttaagatggtctagagtcgatattatttagctagacgctatttagcgataaataattttactagcttatctagcttactgaaggagtaggttctacagtagcttttattagatattagtatatagggccttattaaagttatattagctgattagctaaggaacctaacctataaatagctataaaggaaagggagtataactacctatatttctaaaatatctacaatacacttagttagggagctatataatatatatcccttattcggctactaataagtgatagttatttaattagctaattattaagataattcataatactagaaagggtttaggtagacagcagctctataattattaattactagatttcagtagttcgaaaatctcttagtaaggtaagaataaaggatataagctagactctacgacccttatataggtagtctactccaggtcggtgattagcttctaataagaggactaattatactattttctattataataaaagtaaaatagatagtaatatatagtattaacgaagtctaggaatagtgaatacctacccttaagtaaatttcaaattatcaggggatataactgctcctcttcttaaaaatctcagatattatatacttagagatttatattctagtaatattaggaagtaatccgacttctagatatagggctaaagagtataaaagactaggtagaaccccttcccttaatatattcttagaaataaaatagtattacagctactatagggcttatttagcaggggcttggggctagatatataggcactccttaatccttttcgactatatccactagatattttatacttctttagtatacttataattagcttagagttattagaattagctctaggttatatttactataggaccgatttataattatatacttcggtagataactctttaagccttctatcttaagtcattaatattactatactagatctaattaaaactaggttttaccttttcctatattcttacttcctttatatatactaataatatatctatagtattactagtattgtagacgctcactagagcatttcgacttatactcttagcaaggtctatatatatatatagttcacttttttagacacaaagtagcacaatttagtaggggaattagctatttaggtattttatttagaggtacagtcggctgaaacagagaaatgtactttggtatactagtatcttttatacccaataactctgaaataaaaaaaataagtattttctagagcttaaatagataaaagagggtagattataccttagtcaacaagcttagataagtctatatttaatatttataaagaaattgcttacccttatacctattagaaaagaagaaggtattactaatagatttaatatccctatagatatactaaataaagtcgctaggcaatatttatatagttcggaggtaaggaagccttattagctagaagtcaaacctaagataagtaattaaaagaataggctaaatccgttaggccgactagattagctattagtaatctaaataagttaggctaaggaactgatataggaatatactaaggtattaatataactataggattctttataatatcgtttcctatatataaatctttattttaggagatctataaacctactacagagtactttaaggcctaataagatctaataatagtatctcctaacctctatagatcactatctaaattagatatatatcgagtgatatagaaccaatgttaaaagaaatctatagaattatatctagtcaggtcctaggcctagagaggagggtctgtatttagaaagctgtggccatacagcctttagtcctaggtcctgtgatctagtataattaactctagacctagtaccgacggctatagatacggatccatattagatatacgtctacagctactagtctaggtaggctttctatctattaactaacggctagtctagcttagtaaccataggggcccttaggcttctaactatagtctatataggttataagtattttaatctagatcttaattgcctccttatattatactaccggctctttattaatctatctattataattactatagagtaccgtttaactaaatctaccgcctctttacttataactagattattactgaatattataaatattatctagcgattttcgaaaataatttatccctcagagatatatactttacttactagcttatatctgagataacgctataccgaatatagctagcctataaactaaggctattaataagtctaataagagataagcttattttaggtataggccaataaagaaagaaagtatatatatctaaagggtaaactattttcaaaaatcgctgtatttatactatccttgatagctatattaaagtgggggcaaggcagattgtttctaagctctcttagatcctaaatcctactctctagtatatccctatagtagaatttaaaaatagattaccccttcgatatatatattttctctcttagtgccctaccctacttatactaaccctaatttgtttaggaaagccctactatctctttataaagtatttttagtagatcactaaggttactataactataggtcctagtactaagtagactaaagttactgaaatatcctatgccgatatatagtaagatagcaaaggttttaacgccctaataaaaggtcctataggcagtatgattcttaccaaataggagctaaattatagcgagcggtatacctattaaatagggcggtaaagattaggattataaaacttttaatatattactatcctagagttaaaaaaaaagatttaattactactctaataacccttacaattttctatactatagctatagaagactaacctagtagtactaatatagtaagtcctctacagctagataactatttagatatagacctcttaggctttaatcctatatatataagattaagtgaaaggctccttatattaatatatctatagtttaagtagaggagggtaatagcatttcaattatataggcttaataatactatagttacgaatctatttagtctctatataaaagagttatattatcgctgcctatatacacgtacttgtaacttttaaccttttatatatttagctactttctaagtcttacttatcgataactttttaagctttaaatactacttatacctatatcctattagtcgatagtctatatccagccgccactattatctatagtactctgtagctgagattttatcgattactatagagttattaagaatactcgccgttacttatattttatataataataagtagcttaaaactaaatttactaaagtggtatattaaatctttggttcttaattaggcttcttactaatctaatagaccttagataagaactatgaaattaaaggctagattataagtaaacctatagaaatattaggaaagctatactatactctgtagatcgttagacctagcgaaaatataagcgtagttattattaattctaactaagggaccggtcttataaagattatttataaggggtaggaatatacaactctctaaactaactcaaacagtaaggataaagcggttatgatttttttatagcctaggttctattatatccttataggtaatacttatataaagtatatagagggaggaaggatttaattgtaagaattaaagatttaagctactactataggtaaaggttttttctaatctacttttttttcttagggctagaacaaaaatcttattctctatatagtttacttagaatcttttaggtttagtttatggtatttatcgaagttagcttcttaataagagtaagtaactaattatatactatatagccgtataggggtttagtaacttagtctacttaatactaggaaccataattacggtaattttaataaactacctaaagtatgtctataaaggatagtaggggactttcctttatctaataaagttaagcgcgatctaaggggcgctaagaaagaaaaccttaagtatataaggggtaatctatttttaaattctactttactataattacagattctagtgtataggtagaaaattgcccttaagccatagactactttaccgcttagtaacctataataattctagctagcgactaagggatataggtggagacccctaggattcaactttatacctagcactttcttctatttaaactacctattaattaaattataagtctatatatagacgtatatactaaataataagtatatctataaattaactataaggtactattagtctatactatgctactgtttccttagttttatctaactttattactaattaagcgataattggtagtaaggataaggctcttggtttttaaatttaatattaatagtaggaagtataataatattattgtactatatccactttaattaagaagttatatcactataataaggaggagctctaagagttactaaggtctatccgaaatacagatagccttattaaggctatatagtaagcgttagatcttaagtactaataaacagctgagcggtactataagtcagagtactagaaaagactgggagataatcgttaaacctatacttaagaaccatatctatcaatttgttaataaagtacagagtaatagtactaagagtaagtatctaatattaattatagggtaggagggtaaaagggaattatcccttagtatagtatacttatctataagtaataattagttagagggattacaaattgagaaataaattatatatctagtaaaaatctgctttcgagtatagcctagggacaattttctaactaaatgccataacctataattacagtaaccttactaatctaccagaaatatattaagagaagctggtagggactttatcctactgaatcaagtttagtgtaagcagggtagggcgccgggagagaaagtatatatatctaaggggtagttatataatctattttcgaattctactatactctctagtaagtccctactctctggtatatccctactctccggtatatccctactctctggtatatccctactctctagtaagtccctactctctagtaagtccctactctccagtaagtccctactctctagtaagtccctactctctagtaagttccttgctaaatgctaaagcccaaaggacccactctagttccctagagctttacagttcgctcctaggagttataggtcccctaggaactattattctaacttctaggagcaaccaaaagtatgcctaggagccatgctatagatcctagagtcggatattatcctaggaacatgggtcttacaataagctaagcagggtctaaaacataggcaaccattatagacagtaaaatatttcctctagaagtaattaacgctcctataaatagataggtattcgcgctagagattagggacttactagagagtactaaaatatactaaaaaactagggtagggcaagataggtataataagggagctttttacttatatctgcacaaatcattatctagctaggcggtttaaagtatagcttttatataaactaagcctttaagggctaatatagttttcacttactctcaaatttattccctattaggtatagtaattataattataccgaagacttacaactttaaggttaattttaaattatttatagtcttaaagctactatagtcttagaactactaaattagtagtttaggaacctcggtagttttaaaaccatatataaataagaattaaaatctatatagtcttaaaactacagtagttctaaaacctttaactgatattaggctaataaattataatatactagcgaattgagtttaggggtaatctaatttgtaattaatatatactaggaagctgtatagaagcttagtatacctactaacgcagctatatataggctataattaactctttacctactgtaaaaacattagctatagcgataataattactttaactatagtatataagaagcagtagcctatatacttataggctgtctaactttagtagagctgtaaaggaagcttaatagggaaataggagatatatttaaagtatatcgagtctactaggatacttaaaataaggagagaaaggtaggctagatattatctcgcaggttaagacagtctaaattgtactagactcggctagagctatatagcttattcgcagccgcgtaccgtaagggcagtcgagtaataggaatagtaattaggctatagtaggtattaataaaactctgagtatattcttaggaaggtgattcttttatagtatcttataagtaagtaatataatatagagtacattttaagctactttacttacctagaattatctattgccccttattattctctatacagcttaagcgaatataattagcccccctattatattatatataatatatacccttctccccgtctaatcttaaccccttagtcctctatcgaattatatattggaattatacctatcctccctttactatcccttctatagagctaaatcctctaaatcctctacccctagtattaaccccccggtataatattactaagaccccgatacacgacttaagctatatatatacctagcctctacctagaagttcggtaaactccgattataagtttagtatattctttaaaagtaatagcggtactatggtaggtagcctaggtagatctattagagatattacagttatttcctctattctctaagaaactcttatattaagaactttctatagaattgtaagcaggttagataataataactagtaaactatatatagtatatataagtagaatatagctttagtaaatataatataaagtcactacttcttttgtcccttccccttatcctttcctctgatttataactctgtgtaactaagctctttcaacctatatataagactagataaatcatttatccctaggaattcccttaccgggtatataataaacgggtctaactaagcttctataagaataggtattatctatcccttatccttaatagagccctagtttataagccggaatttcaggcagtatattcctataaaatagatagatagattattaaagataaagaaagtagtaggctattaaagctttaatttattatagaggttcctagtactagagtaagaataattctctggtttcgagttataggataagggatagataggggcagagttagagttaggatctacgttaatatagaaaggggatataaatattttactagataggaggggtataaaaaatatatcatttgcacgagtaacactatcgcttcctatatttcgttctagttactagtattcttcgaattctggatcttataacccactagaggaatctaatactagaagtagtaagtagctaactgtaaattataggtcttttagaatatcacagttattcgataacttgaaattaaaatctaaaaggagaatttatactatcggagggaggttaataggttaatagccttaaatacctatactataggcttatacggcagtaggctactattaaatgtaaagatagtattctttctattaagattctcttctaagtaatagagtagataaaccggaatcttaatagagaagattctagaagctatataggatactgtgatttagattttgtagtcttattttctactaggtactagtgagtactatatgatttaataaggtacttagccctttcttaaaataaattaggctaggtattactgtagagctactactataacttatatatattagaattaaagtaaagtatcttagggtttaagtaaacgctaactagttatttagtagcctagtataaggagagctattagcaattaataatactacttaaagactactaaccgaataaagtaagatatttagtctagaagaaataaaaaagagtagactttacttaaaacttaggttatctatttatatagtctaaccgatatcttcgcggttatagcttaatattggactaggtattacttacctaaggtactcttataaactacagatagttagagtatagcgatacatttataaaggtaatactagagttataggttagctagtaatagaatagttattagataaaggtatataccttagattaataagcctttcttaaaaattccttattaatctaggattacctagccctaaaagtataggaattttatagcctataccggaagattgattttaaggcttatactaaaggtatagataagctattataggtattagaataagatattgtaagcataatactaggttagtattcgggtttttagatacagtaggcctatattactataggtaagttcttgatatttattctaggtaaaacgggctagtacctatatacaaattttgtacttaaatatatcactactaaaattaaaagggattaagcttaggtattagtaagtatataacttaggatatagctaactatatagagatagaagatattagctatagataaatacagcctatctagctctgtaggaaactaacttctaggtataggcgatagcagctatttatagaaagctttttttatctagatagtataagtagagacgttattttttctcccatctatatgataaaatcaatatataccggattttcttcttcccgacctctataggcagcctaattaatatagagactagggacaagtagggcagtgaactaaggaaagggccagagggataggccgagtaaagattatctatctaagagttagttaggcctatatgatttatatatacttcctaaaatcgtagttatcatatatactctttagttatttctcgaattttaaagtcgatataaactgatagcttatagataaggcgatctaaagactatctataatattaaaatttcagtaaaaagtgtatattatttagtaagcttttatattttttttcccccctagtattatcgagtatagtattaaggtatcaagtatattaaggttacaagtatatctaccttaaagtaagacttacaaagttttagtatccccctagacctaccactttaatacctactacttatagctataccgctatagacctataacctatagcgcgtcgcttatatcttatatttttacctatctaaaccccttaacccttatttttattttataggttactctttatttatttctagaatcctagtactaataaagataagaatattaatagtatatttctaaaatataaaacttcctatatcgcttattataaaatactaaactttagtagatatataacttatatccgatattatatatactatccttaatctttccacttttagcttttatcagagatatagtgaatctatataaggttttctagatatttacctagaatatcttataatattaatatcagacagcttatatcagagagtatattactttctattactatatctaacaaaattattaattttatagtttaagttatagatttcaatattactatctagaaggaacctatataagactagtcactgatttctatcagtttttaccataattaggttagtatccgacttatcatatttcgctatagataattaccccttatttctcttactattcaccttaatatcactagtatctaacacttaaatagaaataaaaagttatactttaagtatttcctattaatcgatttatttatatagttatgatctctagatacagtatttctctatctagacttatacaaccctcagatcaagtctatcgtaggaaatataacaaatttagtatatacctagatattcctataataagactaattattagattaggtctattgtaggaaacactataattttagtatacctagatattcctataataagactaatcgttagattaggtctatcgtaggaagtatcccgattttaatatatacctagatattcctacgaatagactaattattagattaggcctattgtaggaaataccacaattttagtcatctatagtctagatattaatatctaggccttttaagagaagaactctttaagggatttcgtgatctattataggaagtaaagtatcggacaattcctaactaaaggagctagtcggctagctctagctagtttatcctaggttacttaaagatcctacttaaggtttatcgatactaccacccttccttcccttttatcttaggtctagcgccaactaatctaatctagtatatattcagaatacacctaatactcgttagtataataattttgcggtctttttattcttaatctattaatttatactctcccaaaatccaggctatcttaataacttcttagtaaatatagtaaaagaagaatataccccttagtctccggtatatattagagatacagccggtttaataattaaaagagaaaggactatagataacctcttatattatacttttactaagaggggtagaacttattattttctaccctaaacgctagaaataggtaagggagagctttatagaatagcctaagttattattactacctaccttaactcgacctaattactttactattattctataatatttttctttaaatatcattagaatctaaggtactatttgtagccttttaaagtagaaaaacgatagttagggattaagattattacttagctagtttataagataatacaatagatatattctaagtaataagagataatagaagtaggaagattctcaaacgttactagtatattaaaacaacgatttacagctctcttataaagtaaaggctattatagagctatatagtactatcctccttaaaattagtttttataggagaattcgacagcttcttaagttataaattacctaccgagataatggttttcttataaagtagggaaaaggtagaatataaaggcgtttatatactctagacaaattcaaaatatacctataccaatcgatatcgcagttataataatcttaatatagataatcagaaagtctaataaatttctagaggtaactaatctagtattatagagaagttaaagtatagcggaactttccttttaagggaagggtaaagaggtaaaaaagggaagaaagggaagaaagcggagactacctatagaagtaataattagttactaagttaacggatatactactatttaattatatatagaaactgtaccggtatattactactaacctatcttaggtgattcgctaccgttcttttcctaaaataactcccttttattataaatatactaatactatctatctattctatttattttcgaactaccgtaaaccagtattatctagccttagcttcttttactatctactcttactattccttagtattatctcattcttgtagtataagctatagtaaatcattagatacctatcctaagacttatagtaagttagatcctaaagtgattcgtcttatagaaataagatctttaagtgttaatataatagcttatatactcctatcgctagttataatatcctcgaaatagttagttcgatttttactcgtttctttagatatttaattaaagaattttaaagattctttgatattattggcctcttcttagctattattttatttacctgttttattgtcctatagtagcgattctcggtaatataataattagggctatcctccttacttatagcgatattgcagtagccttagcctagaattaataagctctctctctatagaagttaaggcttataagaggattaactaaggtatattattataccctataggtaataatcctactttagaaatagttataacttaagttatcttttctagtaaagtagaccttatctactctatataagtagaaagttaatcatagatttcgaggccttactacgtgctttctctttcttcttctattatctgaatattaatagattcctctctagaggataataatactaatcttttcttaatagactatagataaatactaagattatatttagtgtcttcgataagttcgttatatttatcgataatattcttcgttattttagttaaattcctagaagagttaataagtactaagtaagaaagtaccccctcccccagcccttaatataagaaataagaagacgtatatatttatataggtaagggtaatattaattgtggatttatagcctaaaatcatagtctaaaagctaataatatcttcacctatatactacaattttgcctaatcacagatactaaatttattattagtcgaatactcggaataacttatgattaatatattaaaatcattatatactttataatatcgacctaagggtttttcaataattctactattaaggaagggagctatactaattaattcttagaggatatttagtactttattaaggtcctatagtatatctcggagatcctaaatagacttttctcgattataaaggctttaaataatactgaatagtattatacttaactagagtaccaaggaaactagtctaataaggcctaaagtaatactaataacctcagctatattatataagataaaagggagcgggggttaggttttaagagcaatagttaggtaatactaagtataggctatagatataaatagaaagagcgaggatataagtagtagttttaactgcctagttctagtaaaggtctaactgccctaaaatagctctttttagtataaattaagaaggtatatattaatagctagttattagacctactaacttatagattactctgttcctaccctataactaaaatagaaaatagatctctctagtaatagcctcttaataagttattaagaccttagtttattaactgctacctaaagtcgaatctttgccttaaatattctataaaccataagtaataggaaccaatattttgatatatctatagaggaactgcttactcctataataaggcgagaaaataaatatcgcaatatctttaaggatattgttatagagaagtatatattccaatttattagatctataaaggggtatataatgaccataagatcagttatagctaaggtatatactacccagtatctaggagatacgtctaaatctataatctagtaaattttaagggaccgtagtagaatcatagtaaagaaacaacctccttactactaataacagataaaaccttttaataggcccagtcatacagttatatagtaggtaagaaataataggtatactacctcaagattctatatctttactatagatattttgatcagaataatcttatagattaaaacgatataagggagggagggaggaagtaggtataaagaatagaggtagttattaggagagggctgacagaagagaagcggggtaaaagataatagatttataaagaatatataagaaaacatatctaagggctttattttagatagggctaaaagctctgctcctattactctagggttaaaagcccccgaaatttatcgaacggtattagtataatatctatagtaccgccgctctttatcacacttcttcttatagagcttatatatagtttatatagaaagaggttaatacctaagtagaggctatagcggagattctaaaatatatctaaaaacactcgaaattcctaactagattcgaaaagtacagctcctataggattaaggactcccgtaggactagacagatacagcttaccataaacgagccgcttttactattaatattatttagctatataacttaagaaatacgcgaaattttaaaagctcttattcagactattctaggggtcaaaactttagggttaatattagcctaaagttactatctgatttcggtttaaaggatagagatggatttgccttatcctatcctctattctttaataatacctgtggcgccgaagtcctactaatatatttttaagggatcggtttttagtttaacgaattactataaagggactatatataaagaagatctaagctaatatattaaaagctataatctctggtatcttaatttcttctaatatttactatactatatataacttatttattctaatacttaaaacgaatttataataccgctaatttaggtactaactagtttttactcttaaaaagcgaaagacaatatctaggttaaggtatagagtatcactatcgtttactcttaggtaggggtatagacgaaatattaggtacagaccgctttatcgttagcttaaagccttagctataacgatctttaaattctaataaaggctgctcttataagccttcgtcttatatagaataccctactgaaggtaagcctctataatcggtatttataaaattaaccctagttatatcccttaataactgttaaagcgatatattacttagatagcccctaacttacctagtcctctatcctagcctacaatttctactataaattattttcttattagtagagactataaattaaatagtattactaatagtataattatcgattatactagcattttcgtctaaatgaattctagcctttaaatagatatatatatactagtaagttatctcccacttttcttataacctaagaagttctgcaatatcctcctaagagactgtctttatctttatctttatcacaatttagtctattactatcttaagataattctctagcttcacagcggtattaataaggctatttttatattcctataaactatcgttagtaactctttcgggaatattacttaaactaccagagttagtagagttatcacaagatttctatattttttaaatctaattaatatagcttgataactatatatatatttcgagatatttttaggtacttaggcattcctcctctattagctaaatttctctagtatctatgattaagttatatatatttttagcgataatattcttaagctttttattaatactctctaaataagttttaagattattagttataatttcaattatttccttatagcttttaaggctatcagctataatagagaactatcggctagaaaggtatattagtataagtttaaatataactaatatatataaagtgatttatagatttatattattaagggtaataataatagttgatttataactagctaatatctatctaaaaccattaatatcttcgcctatatactttaatttagcctagtctcgaaagcttattttactagtaagagattgtatcgaatattttttaagttccttttcaaaatctctgcaggtatttctataataaaggaggggatattcgaggctaataaagtttatatcggtatttatattcaaggtttctgttagagcgctaagaactctatttagagtcttaagctcctctgttagattgtagatacgttttagataagattagtagctttaaaccatatcgaagagggcagtgctagattaaaatataaatatagctaaagctactaggccagatgctatactaataggttctactattaagtatcgcttaataataagtaggtagtgtagtactaggatagttagaaattatatacttaagatagaaaattacgggggttaagccttaactttatatttttaagtaaataataggagtgatccttatctaatcaggtctagatcataagcgcctatctcttatataataggacgaggtaaaaggcttgataccgtcgtctagctaggaggggtattatagtaggtctagaagctagctagctaataaataacgtctaggcctacttaacaaacattttgtagcactgaatttattcctcctaataataccctgaatctagaatcagcctataataatatatataattatagtattgacctcttttcaaatataattaatatagaagaaaatctaggctatagaggattgttaagaatactaggagctatataccttattcttatctccttacggcctacaattaagactatttgccgctagcagtttaaagaagagggctctgttaggataaattcctttaggcctggttgaccaaacaatttgtgcttttagctatctagtataatagtataacctaaatttctagttagcggaatatataataactacctaagaccattttagctcttaagtactagttattagcctatagaaattgctaaagattgtgataaatatatatattaaagacgaaaaaaatcgaatatcctagacctaagtactaatactcctttcttattattagtaagataaattattttctaagctaaaggtaattgcataccttagtctatattaatatctaatcctgattcttcttttatatagtaattgcgattagtaataagatagtaaatatcctctgtgtacttataaagatatattttgtatagaatatcctcgctatatatataacatttccgatcctttaagtacttttcctaaaagtattataaagtcgatttatacttactatatttttgcgttcgataataaataggaagctaggtatcgctataatattgaaaatattgccaaggttttttagccttctaaatatacttccctgccttttctagaagtaactcttcttataatattttaggaaagatagaagttgtctttattattctcccttctattatcgtttactctttattaggtttattagttagagctaaccgtttatattgtctatatagcggcctacctttaaggtaataatagtattataagattataacaactgctgtattttatctttaccacttagcttctaaggaataggaggtcggctaggttaacagcttctcgagaagattaatctactctagtaatatactatctatttatagggcgtccttcgcttccttattattaatagccgctctagagagctatcgcttaatatctatattcgcttatttatagttaaactccttttgaattttctatcttaataccctctctagctagccgaaggtattaagctttttatatacgagtttattatattacgattgtatctccttacttgggttatagatataaacgttagcctacttatctaatcggtagactgctttaagatactctagatattcccggatcgacgcctattactcggttattaggtactaaggccgccttatatcgatctacctacttatataggtaattatatgtataagagatatattagatttataaccgtttattatactttatatatctatattaatatattgaggaaggtaatattttaagaaggtataggaatctatatactttataattagattctactaggctttactaaccgtatcactattatttaatatctttctatctctatagtatatataatatataaatattgaataaagctaactgtaaatctctctaagattcctcggtcgaggactattatcatttttagagagttagagaattgattgagatttttctgtcatatatacattcgccttaccaccgtttttccgttatatcctactatttgtactatataaaaaagcctctcttttatttgtcatctaaccggcagaaaaagattgactatgcctaacgggcatatcccgacggtccctagagaatgaatcatcattttcttccccagagcttcaatagtcataatttacgtagcattagaagattagttattctgctctacaactgcggccgcccataacccccgtactattcgatctataaagaactagcatataacacaaagtagttttggtaggggtgcgtaaatagtatttctcttgatgtattataacatattaggtaccggcactgatcatattcgtcatcatattccaatgttcatgcctctcattgcccagaaagtctatccggtattatggccaaaagcgacctgaaacctaaccaattatcgcctcagactaagcagggtgagcgacgaaaacaagttctcattcgcagtcatggtgcgggtgccgggggagggacttctggctttttttccactttaggaccccctttgccccctcggcgattggtgccacctaacatccacatcgcgaaactcccggggacatctggtcctctggccttggcttttttaggagctagagaaaaggtaagcgcgtgtctttgggagtgcttgagagtgacattcttaccatctgctttcttcttcggctccgcaggcggatcaggaggttttacaggggccggttccggtgcagggggaggagggtcttcctttggcttttcgggaattggccacatgtgcatagtgatagcccagtcaggctcgaccacagtttcccaaacctgtgggaggataatgtcgccattcgggccaataaggtcataatgaccctcggcgacatgaggtccaatgacttcaatatggaggaaagcctgccggatgagttcttccatcccctataactaaaattaggacgagagaactatatgaccggagtgaggggttgacatacctgccaggtagcacatagttcaaatggaaaactgaattttctcccaacagcatccttgaatttgataggctgcttcttctctgggggtggtggtggcggcggtggtgggggcggttcggcagccttagcagctgcctcagcagcttctgcggccgctttggcagctgcttcattagctgcggccgttgctgctgctgctgcctcggcagcggccgcggcggtggctttctctgctgcctccttggccttcgcggcatcctccgccgcctttttttcggcatccgctcgtgcaagcgccgcagcttcctgggtaatcttccgatcatgcgcagtctgcgcatcctgggctgctttctcggcggccgcgcgttcaatagcctgctgtttggcaagctctttcgcttcacgatctagacggtcgtccaaaatcaacttctctagcctcgcaatttgctcatccttggcagtgtcaaccggtggaggcggtggtggagggggagcaggttcaggggctggagccggagccggagccggagccggggctggggctggagccggagcaggttcgggagcaggcgttgcagggggcggagatttaggtttgggttgcactggaggagaaggcactgggggatagggtggccaataatgagaaggcatcatgcccgggatcggtcctccgaaatagctgggttgatctcgatagaaaccagtctgaccgtaggccattaactcgtggggatatccagggtaaggggaatggataccgtggggacccatcgcgtgcggcattggcggcattggcggcattggattgtgcaattgaggcggctggcgaggcgcatgtcgtggatgaagttgcggttgatcgggaagaaaatgaggcccaggttgaaagtggggtgggtatccgtaaggcggaggagcaccataggggttaggttggcccgggtgaggaattctcatgagttccgatgtgatcggaggaggattgtggtgggcatacgggccatggcccgggggtgggggaggagggtagggagtataagatggaccagaggactggctaggggcatatccaggggcgggtggcataggttgctgccaccccctccgatcattccgaccaaaattgagagggtactcatcggcggaatcggcactatcgggagaatctggtgattgttgtcttcggcctcgaggggcgaacgactggtgttcctgaaccatacgtcgcgatgttgggcgacggcccgaagcggagcgtgaaccgtggggcggacgactgcggtgcgaagttcttggtcgggaggctgaatcagatggtttcaattcatccggatatggcaaatgcgcccactcatcataatcctggtactcatgactttctaactcggaagatgtagggacatggacaccagacgagccctcgtcgtcggaataagagcgatccgagccgtggggatctggatcaatcgagatactgagcctgtagagaaaagagttaagggtgagaaagtgagtttcttaaagaagggggagggggatataggaaaacaaaacccaaacatacgtcatagagacaatgagaagcctttcagaggtttaaaaaatgtatatatcaaggacaaggacttgtcctcccactttctcgcatgcgcgaagtgaggagggaatacccaagtagggtttgaccagacgtgtaaagttgagggagaaaggaagaaaaaaaatgtcaggtgaaaatgatcgcgggggatttgcgcatggacgaattatctctctttgctttttctgtcttttgtcccttttttctcttcttttgatcggatctctttgaatagagtagaatagaaagaacagaagaaatataaaacaaaaacaaacaccctttttaaacgggatagggggtataagaaggacagcgtaggagtatatggagtacaaagtatgtaggacaacaagttcaggggtacagatatctatcaaagaaaagaaacagaacagaacgaagaagcccttttttagttctcgaatctgatatttcatcaagcccattgggcattttcttttgtgtgtttcttaaaccatctttttctcgtttcaatctgctgcccaaacggaaatgcccaatatctctatactccgatccactccccgtacaatgccccataccttactccatacatatgtacaacaatcgaacactctagatttcaacagatctgttttattagggtatgctcgaatcagaaggcttagttttgagccgcctgaataattacttcactggcgattcagtagttctttggctgcaatcagctcgcttcgactcgatgcccaatattggtcatcgatcgaccgtgactcaacaatctcgcctaactttaggagcgcaaaggccttcaatcgttctagggtcttcttgggaaattgacctgatacgccagcgtaatcattgtcaagcatccgagttgaggcctacgggggaaacccgggttagaatggaatgagccaataccattatttgccgacttaccaaagttaacccatagaatcctcgcaggtagtcgtcacaaagctcaatgcttcgactgaaatgttgcaccgacctcccaaggagccgggatgcgtccccatcggaggcgcatatgtatagcagttcaccgaggcgggaatggatcttacattttaatgttagcgaccatttgatttgaaaaagaaaagaaaagaaaagaaaaagaaaaaaaggtgcctgcatgcatacattccaagagttaggagcaatgagtaaagcctcttcgaggctaaaaatggcttgggaagccaacccttgtgactgatacaagtcggccagttcacaccaggcttcagcatcagtagggatggcatcgaggagctgaataagaccggagattgcatcagatggtcggttgagcgagcgtaataacgccacccgccgcttcaggatgggctgtgtgtatggttagtcttgcatagcccatgactaccccaggacctgtaaccaatactgaccacattcaccggactctgtgacagggtattgtcgtattcctgcaggcatttctctagcgctgactgatccttggcggttgcctcctcgtacagacctcgaagccccatgatcctttcattagatggtccaaaccggagactgaggcgattcaggcaggtatgtgctgactgatcatctcccgtccgaagacaggctaatagaagctgttctaatcgtgcatagtaatctgcagtttctgaagatttagatgaggtaactccagacccggatacctggcccaggatcgctggtgcttgttgagcaagatgaagagcagagatcagatccgatccgttcatctcacggatatcagcgacgggaccagccataatagactgtcaaaaaaagacaacacagcttcaaatgaccttgagaaaaatggtgctaagccgagagagcaggggtgctcctattaggacagatgttaagagaacagagtgcaccagagcttaactggccagagtcccgtgatccggtctcttatcggggatccccccaaacgccaacttctccaccccgcggagcttgggttgctttacactcaacatctttcatttttgttctgaactatggctgatctgacagcccaatttacaatgcacctccagtcttactaggggaattcgttattattcttcccttgactcgaccttgtgaccattgatagctcgacacgatgtgggcacccccatgtttctgccctagattggccaccactaattccagtaccctaggtttgaaaaatcgctttatgaccttataaaaggtctccggggtcacaaaggaggcgaaaatgaatacatccagagttcattgcgtgaatgcaaggccgagatcaaaacacaagacatgggtactaactacctatttacccggcaatggatttgatgctgatgtcgagtagacaaaaaagctacagccctattgaagctcatctatcttgaaatgtttgggtatgacatgtcatgggcatcttttcacgtcctcgaagtcatgtcatccgccaaatacctccagaaaagagtcgggtatctcggagcagtacagagcttccgaccagatactgaagttctgatgctggcaactaacttgctgaagaaggtttgtaccctgcatagcttcaaattccccttagtcgctaatgctcttgacaggatattgtcacctccagtattcccaacatgtcactccctttggtcactttgccgcacattatcacaccttccctagcaatgtccttgcttcctgatttactctcccggctttcgcactcaagccctgtggtgcgtaagaagacgattgtctgtctctataggcttgctttggtgtatcctgaagctctgaagttggcatggcccaagataaaagaccatttgatggacgaccaagaggatggaagtgttactactgcagcgatcaacgtcgtttgtgagcttggttggcgacgacctcatgacttcctccctctggcacctcgattctttgagcttctggttgatagcggcaataattggatggctatcaaaatcatcaaacttgttagtcccctatgcccccaaccctatggaatgactttcttctgagcaccctctgacttctgctagtttgcaacattaaccccgctagagccaaggctgactcgcaaactcctgcgtccattgacgaatatcattcaaaccacatctgcaatgtctttgctctatgaatgtataaatggtatcattcaagggggaattttggacggagaagagaatctccaggaaagggacgaagttgccactctttgtgttggtaaattgcggggtatgatagttatggatagtgaccctaatcgtgagtatccttttatcgcatttcaaatatatgatcactgaccatcgaggcagtcaaatatgtcgcacttcttgcgctgaaccgcattgttgctacgcatccaacgttggtttccatgcagcaggatgtcattatggattgtctggatgatgcggacgtctctattcgattgcaggctttggagcttgccgttggaatggtcaacagtgattctctccagcaagtcgtgaaccgtctactagatcagctgcaacaaacctctgtgcctgcagctgaattggttgatacgcccgaaagcccgaaagccccgaccttatggcccaacgactaccagactgaggttgttcaccggatcttggatctttgttctcaaaagaactactctgaaattgttgattttgagtggtatgtcgctgtgttagtacagctagtcggacttctcccaccgtcggagagtgaagacgattggagtcatccgaaagagcaagaggctataccaaattcgaggatgaacgttgcgcttcgaatagggacagagcttcgcaatgttgccgtaagggtaaagggtgtccgtatggaggccacaagggcagctgagtctctcatgtttatcgacaacagatcaacttttttctccttcggttcaaccatcggcgatggtgtcttaggccccgtcgcctgggttgtcggtgaatatgctgaatatctactgtcgcctaatcggacactactgtcgttgatcgacgtctctaatgcatccctcgcccccagaactctttccctctttttgcaagccattccaaaggtgtttgttcagattagccagaccagtgaaccaggagatctttggagaagtgagatgtcgctattacttgctcgagtcgttgacttcctcgagggtttggcagcccatcctgatctggatgtgcaagagcgagccatcgagttcctagaagtcctccgcctagcagctgaggcattgacttccgatacacaaaaaataccatttcttctcgcttccgtcataccaaacctattcacagggctcgaactcaaccctgttgcgaccactgcgcagaggaaggtcgtcttaccagatagccttcgcctagaggaacctttcagtcacgatctgccaggactttttcgcaacctggacagcccatcatcgcacgggtcaaagccttgggaaataacagacttctatcatcttcctgaactctcgtatccgaacaagcagactcgtgacctcgcaccggttgatttgcagccccatgcgtcatatcaaaactttaccggtcctccggtggaatcctctactacagtacaaagaagaatgcttgagcgtagagaacgcttcaaggatgaccccttctatatcgctccttccggagaatcatctggcacatctacgccattccacgaagctctgagcacatccaatggcgaggtcttggacattgattccatccccatagttaacttgaagttgggagatgaacaggtcagccatgctgatctcgatcgccaaagaagtcgtcgaccacccgtgaacaaattggtagttgctggcgatgagacctttgaaactccgaactctttgacagaaacccccaggactaagggtgcgggtgatgaccatcctatgtataagcgctctctgctccaagttgactcgagcagcctagggaatttgtccttggaaaaaggcccatccccccaagtttccgcagatgaaggggacacagaaatggcccgagcattgcgacaagtggaggaagtacgattgcagatgcagcgagcatcggagcgaatccaattagagggcactccggcagaaggaaccctagtcaagaagaagaagaagaagacaaaaaagtacgttacttcagaccgagataccggcacggtggttgaagaccctacggaacctgcgacagggaagaagaagagaaagaagaagaccaaggaatccgaaaagctaccaggcgaaaattgaatatcttccaggccggcggagtgaatcttgcaacacgtgtggtatttggctcaagcagcaacagtgagatacaatcaaataatacatatttcaaaagaaaaaaaaaggctctctgacatgcgaaccatcttgattttgacattcatttgttcccaaatccatcccttgttcgtggtccattgacccctcgacgtgagtgtggagtatgagggatggtcggtcatgctgactcgagacatatcggaaggctataagctagggtattggcacagtaggtaaatcgtcgcttgaagtccattttatcctgtgatccgtgtgaaccatgaaaccacagtggaccagaggtcagggacaatccgtaggagctctagaagaagaccgccgcaaacaacaaaagcgagtagcactagagactcttcagcacggcttcaatttaacagtggagttcagacacataccaacccagcttgctgaaaggggcgactttgtgttcttcttcggtttaattgtggttggcgcctttcccctctttgcggcttcggtcttcgcgaagcggtcatttgctcgacgttgctgtggtgtttgtgcctggtgtgtgttaatcatcatacacaacaaacctatagcctctggaccttaccatgatggtttgcgtatgagagagatttgagggagacagatggatggggaagggataattcaagacgtgaatgtgccggcaaaaaaaggccacgttgttttttggggagacacgttactatatacactttggccccctgaaattaagtggtttcaatctccagactaattgcgcgatggacgagtagttttcaaaatagattcaacattatgccttcgttgtcctgatattcttataaaaagaacaagaagctatagacaaagataggtatagggaaaaagcttggtttgagatggtgtagtctctgccacaaattacgtacattactgtaatctgtcaaatggagaatcctgttctttcactgtctagagagaataaatatacatcgatgtccaatatatacgattatactagtatggatatacgacatggagtatacggggaatcagacattccaaaggcggtgtaaacagtcggagaacaaggcggtcagggatgacatcagtggacttagtcatcttagtcaggctcagacatcgacctcggtaactacgattggaagacatagttatgtaccctagttaggtaatctaaaaccagcccgggcacaaagtaatcttattattcacttgaaagtctggtattgtaatatcgctacactaaatattcagaatctaagattgattattgtctatacatcaatgggccgtttatcattgaagaagcggcttccacccgatctgctcactggccgagtcactgagaagatcggtagagcccgtatcagcagtcacaccactccctggactatcctgcgatgatgtgtgttgactagaaggcgatactgccccgaccttcgtctgagaacttagtgatagcggtttacgaggaacagccggtcgaactttcgccttttcaactgcatggggcgataaagaccccgtgggggactcgaaagtatcgcgtcgcggaggtagcatgggcttctccctcgtatcttgaaccgggtcggtgtttctgttctttagggagcctagacttggtacccaatcgacatccgcagaaaatggattggattttcgttgaggatttggaatatacccttgcttcggtggttgtactgttgcctttacggatgcgcctgtcatgcgttaggaacacccgccatatccgcagaccaagacactcaccattgtctagccaccaccggcttctgtcagagcttgccggtggcagccccggtgcgatagaaacatgtgttgtcatttcgtcgtcgtccaagtccagaagagagacagagtctgcgaaagaattgtgaccgtggccctgtttctcctcgtatatcgattgtctgaggctttctttcagtgcatggtcgacgatatcaatgacacaatcaaaagttgcccagacgggacgatggtcagacactttcaaatccgcagtttggtagttcgtttgccgcagattgcttcctctccataaaattcggtcacaccatgcagggattcgtgatttttcactgccatatgttagttgcctcttggttagattcacagtgtacttacgacgtatcatagatgtctcccccaacgtcgtacttataagtcggcggaaactcgattgggccttctgaatagaattgaaacaccctgcccgctaccatctgtagattcaactattgttgttagcccaacgtcgggtgtcaaagggttatttgccttacttgatcattgtcgtatagcctttggtagtctcgctgtaagatgagctctcttacgcttgggttacccaacccaattcgatagttgaaatcacctaaccagatcactgcgtcatgatcagcgattgaccggttcttttgaaacctcagcgctcggtcgatgatctcatagtctctatttctttcatcgtagtttgcaaacccggcagcaagatgagcggtaacgaagcaaatactcgtgttggagaagtcgaagcgaacagcacagccgcccttgttaccagcaatcccagaaaggccggtctgtgaataccagttagttggaatagccccttggaaaatgtagaatgacttgccttcttcacactgccttcaacattcttgatatacttcagcgaactctcttttacgtagagcagaacagcagcgccgactagctggccacttctcaggtgcacgtattttccagtccctttcatcttcgaatgggtgtttaaacaatcgtggaccgctctttcccagaccttgcgggtgctgggatcggtggacataatttgctgagggctcagggcgacgatttcctggaatccgacaacaaatattgttggatcttcgtcggactcatccgactccgggaaaagccacggagtgagatcagtacctgggccttcattacgtccattcacattgaaagtgccaacccagaaccgaacttgttttcgcgaagaatattctggagttcggtggttcaactcctctataaccaaatcattgattggatcgtagaggtatacagggagttgatttgtgagcctccctaaaagaagatcaatcgtcctctgtctagccttgtccgtgaaattgttgacataaagtcgagtagcactcttccgcgcatctgcaagtgcccccgcaagtgacatctttccgtgtcgggtgaaagaggatttgagggcgccggtcccggcataaatcttcgaaagagcatcaccattgtccgcccagatggtggaatgccgaacctgcatgtccgaactgagcctgccgccttgctgcgataaaaaatactccaatgccatcaaactgatgatagtctggacgaggtttgttctatccaggcagtccaggcaattggtccgaaacacaccctcttgctgtaaaatgaccgaagagttgttcactgcatcatctctgtcgtagggggttttgttgggacgatgtgaatcttccgacaaaaaataggaaaactcatctaatgagttgacaagctcatgtttgatctgggagctagcctcatatcccgaaggacctcgggtctcagcaagaaaatcatattcggtaagtcgcaaaagactccgatgtggggacgtcccgtcaccttctttctgtcgcgttgagctcttgctgatgtgctttcgaaacttcgacgacaactctgcttctccaggcttcagctcacttagcagatttaccacatgtactgcgccatattccaactccagagcttcaaagtgtttgttaaatgcgtgctgcgttgcgtcgctcgaccgcgtgacctcaatcttttgctgccccggaatgagccctggggcttgttcccagaaaataggtaccgagcctcggacttgggcatatgaaaatgcaatgcccggtgaaacccatagaatggtttcggtttgcacgaaattggcgacattcccatcatcgtcaatgcctctcgagttaaacctcgtaccagcacggcgagaagcttgccgggatatgattgtcaacatcgaagggaagtttgtccgcacatgaggaaggattgaaaccgtcgctggcactttgagtgtactggcaaatccacggataacacaggttaacatctgcgatgcatctaatttggccttatctgatggtggcaagtggctccgaaacaagagaagcggactgatcatgtaagagttccacagcatatcttcatctagagtatcgatgtcgaatgccacgggtttgttggcccttgcagtattgttagttgaaaaagatcggccagtgaagaacaaggagcggatagcttaccggtcttggaggcgatccgtaaggttaaaatcgagactgtaatagaaactcccatctccaaggagcttcttcaacgccaggaacggatggtcagttaccacatctttcccgtccgtgccgagtccctcctcggcggcgaattgagacccggtctcatggtccaaaccgtactcgtattctgaacgattgagacaatcttatattgttagcaattagtcggccagaaaggtgcataggaaacatacagaagcctacattgtcaattcttgacacggtttctccgggtctcacggtggcagcttgcgaggagccggtgacgacgcagacaaacacatcttcgttgagagtaacaaggccgagagtaccatatccatatcccaacggcctgtagccttccaggtccacttcctctaagtccgagaactcgacttgacagcgtgggctgtccttcgcactggtatcggttgatgtgtagtggaacactagggcatgttcggaagagaccagcgcaattgtacgttgaggttgatctcgacagagaacccggagattcgacatggcgcgagagaaatcagagtgtggggagaagcagtggcattgcttacttccacaccaataagtcttatcctatttcggcgatttctatgtcctagaaaaggaccacttcaccacaagagcccgaacaaagcgaagaaatagcttcgattctcaatattattaaagaagtcctcaataataataatataagaattattgtcgagctgaggtggagttgtcaagagctctcccggtctattctccccgcgacgtcgggagccctggaacaccggccttatcggttgcttactcatcccgcgtctctccacttttttttctttttcttttttcgattcttcgtcgatctccaacaaacacatttctctgattgattcgatatcgtcgtcatgggcttagcagggccgaggaagtatgcgacccaactcatcctttcacgcatgattttctaacgcccgagtaggagtaccaagatcggcaatgatcccaataacaccaactggacccggtccacaaccggattcggacatcggatcatgagctctcaaggctggactcctggaagtcttttgggagcaaaggacgccacgcacgccgatttgttgaccgccgccagtgcttcccatatcaaagttaccctcaaggacgataatctcggattgggtgctcgtattggacgagagagtgagccgactggacttgatgccttcaaaggattgcttggtcgtctcaatggcaagagcgaagtagaactaaagaaagatgaacaaaaacgtgatgacgttcgattggctcgatatgctgccctgaaatttccggaagtcaggttcgtccgcggtggactgttagcacaggagaaggaaatcgagattcctcggccgacccctaaggatgaaacagccaagagatcgaaatcggacaagaaagaacgcacaaagaccaaggacgacggaacctcttcaagcgaatctgatgccccagcccgcaaatccaagtccaaatccaaatccaagaaatcgcgctctcgagacgaaacagatggcaacgaatcaagctcggaatcaaagaagaaaaagaagtcgaagaagaggaaggcagattccgagcagagtgaatctacagacaaggcatctgaagcggaagtcaaggtagctgcaccaatttctagggagcggcggcctatgggacgaaatgtcactcgttcacgccatatcgcccagaagaagagagctatcatggacgagaagtctctgaacgaggtaagctgtgcagcaactattttccattatatctttgctgaccttaaccagatcttcatgatcaaagcatagagtttatgcaagtctgcatctgaagcgcattggatataaaacttggagttatttggtgttttcactttctaagatttcccgtcttgaactagatatatcctgttataaatcaaaataatttcaatctcaactattgttatatcatgtactccgtatataccagctacccgtaagcgaccactcagggtggtgacgcatacgggttatagtttgctgggcgtagacgaagcaaagtctattgtagggagttatagttttgccgagatatagattacctaagctaacccgttccccgggccgggtgccttgcagtatccacattcaacgtcatatcaaacctcagcgtgtttgtccctaatcgcggattgctcggcattgagggtgcacagtcccgactcacgccttaggagaatttgtacaggtcacttgcatcgaatccccgacggagaatcgttccgcgatctaccacaactcccataatctctggcaatctacatgaacttttagcacctctcgccctgccacgacccgagcggagactgggagctgtgcagaaactgtgccaccacagagggttgtccctcctcccattcaacaatgaacggggagacgttgtcagctggacaggcctcggcgtccacatctcagtcgagtcgcggaagaaaacagtaagacaggtccaacacctcttgaatatatccgtaactgactcatatagcatccactgggcacctttgaatattggtcttgagagacgcctacaaacattcgtcgtgctatgccacactttgactatcgctatcttcctgactatcttcttttttacatgcgccatcccgttgttctggccacttttggtcccatatctcgtttacatatctcttttctctaccgctgctacatcgggcaatctcaagggacgtagcccattcatgcgctcacttcctatctggaaactgtatgcatcttacttccctgctcgtcttcaccgcgaggagtcacttccgtctacaaagaagtatatctttggataccatccacatggtattatctcccatggtgcgttcgccgcatttgggacggaagctttgggcttctccaaacttttcccagggatcaccaacactctgctgacgctggacgcgaacttccgtattcctttctaccgagaatacgcacttgccatgggacttgccagtgtttcccgggaatcctgtgagaatattctcactaaaggaggtgcagacggagaaggcatgggacgagcaatcacgattgtcgtgggaggtgcccgggaatctctcaatgcccagcctaattccttacgtcttgtgctgaagcgacgaaaagggttcgtcaagctcgctattcgaacgggagctgatctggtgcctgtcttggcctttggtgaaaacaacctctatgatcaagtagactcggatcagcacccgatcattcacaagcttcagatgcttgtaaaacagactttaggattcaccattcccctgtttcatgcacgtggggttttcaattacgacgtcggactgatgccctatcgaactcccctaaatatcgtcgtcggacgaccaattccggtcatgcagcagcagaaccgcgacaagatcaacgatctatacattgatgaacttcattctcgatatgtgaaggagctggagcgcttgtgggatcaatggaaggatgtctatgccaaagacagagaaggcgaattagagattatctcatgatactacatctttatgtacgggttgaccggtctactatgacaacatgtgaaccctatggggcatattatacagcaatactcatagagaaataagccagaaatgaatccgtacactcgatctccaatgtagttcggattaaataacacgcgcgaaaaagtaaacctatgaattgggtatcagatcagacaaaatcagagcttgcgcaaaagcataaaaaaatagataaaaaagaagagaaaaaaaaaaaaaaaacacatcgaggctttcatcctcggaatggcgagctgaggttcggatcgcatgaggtagcagttgggtttagacctggcacttccgctgatgaggatactcgtcggctttcactagcaatgctcctgttcttagcactgtgcccactttctgctcgaacctgaatcatttcctccagcatgcgtgagacctcgtccatattcttccccgggtcctccttttcactcctatcagacaagggacgcttgcctggactcgcagacagtgcaccgaagccattggtccctgcaaaattgtctacatctcctgtagtagagccattcttgctcttcaactctggtgactgcgagtcattagtcacagcagccaagtctcgatgcctagctgcggaccgaagcgcagcaagcatacgatccttatcatcgagctgcaaccgaagctcattgatctccatgtctttctcacgaaccacagcggagacatctggatgctcggcaattgtagcatttacaggcttaatgccccctgacattcgggaatgactggaccgtcttgcctgaagcagccggcgctctagggtagagatgtaacggttcttatcaccgagatcagcctgcagcgcagtgatctgtcgttgcaagctggctttgccatcaccaaattcaccaaggtcgtactcgtcctcgttgccaaacgaacctcccgtgtatatcatagccgacgacggatcgttgctattgacagacatgaacgagatgggccgaatcgatgaatgaccggcacccagtgtagattggctggcggacgaacgtagtgaacgtgaacccgaatccgttgcagacatgcgagaaaaacgcccaaacgcagagaggctattatggttgttgacaccggtggacttggagctcaaaatcaggcgattgagatgttcgatccgctctttgagcgcagtccgagccaactgcatttccaacacctgttcctcgtgtcggacctgtgcttccttttcatattgttgttcgtcccatttgagttccttctccgcttgggatttggcctgagtatcaagctgaccacgaagagcctggatctccatacggtaccgttcaagtagtacccgacttccggaatcaccgccaccgccgccgtatgcctcctcggcctttttagcatgactgacaatattattcttcgctcgcgcagcgaatttcatggtattcagagtttcaccggtatgcgaattgatcgcactcgaaaactgaatggtgcagagaatactcacaagcgaaccaccggacaaggctggttgtaggagtctggtcaacttgctatcccggtaaggcaaatgcctcccgtcacggtccatggggttgccttgcttatccttattttccgagagccgagagatgatggttcccagagtgagcagacttttgttaatatgagaaccttctgtgcgacgttctttatcatcggccgcacgctcagagccagccagatcaatcagactcaaggtcgacactcgcacaccacccgggggaatcccggcgcgcttatcttgagagctgccggatggcactcgctctcgactctcgaccacgatctgaaccaccgcgtgacttcgagaactgcgcgcattgaactgtgtgctgctcgttcgtcgtgcatggtcaccccgggcgataacacggaggagttgtgtcgggctctggacaatctcttccttgagcggcgttgcatatactcctcgtttgctgtcctctctcagtttgatttcctcctgctgggttcctgcgggggcgttggcagcggaagcggaaaggaggtcgttaatcttctcgttgtagatttctagatagctgacccgcagtaagaattcccgatgtggggtctctctgatgaaggaaaagatgtcggtgattgcgagcgggattacaccgggcgaagtggctgttccctgcatagagaaggtctttccggttcccgtcataccatatgcaaacaccgttccgtgatagccctccataacgcgccggaccagacgtttggcagccgaatcataaaccttggcgttgttttcttgtggattaaagacattatctgttcaacgtttagttacgaggggtgggcaagtgagttaaggagtatcattctcaccataaaagtaatcgcctccttctttcccacggtatgagatgaggctttgccggctatcgacggaccattcgccatgattgcggggagtttcccctccgctgttgttgtctggacgaacgcgcacgctgaccagcacattgcctttgaactcctttggcttagagcttgattttcccatcgcatcatctgcatcttcaaaggttgtcgcactcgttgagcaagatccttgggcagaagaacttctgctgtgggttggagacgcctcttgatctcgcgcgtccccacttgatatgtatttcccctcgccactgccgttgagtaatgatagggttttggagctccgataactgctcgtagtgcctgtgctcagtcgcgagcttctttggggtcgcccgttggaagtagcaccttggattccagagatcgatgatgcagtggatggacgactgctggcctttggtggttgcgggaacgaggcgatactaattgttcgtcgcaaagatttgtcggggctaccaggagtgcgcccaccggaagctgaccgagccgcgtttaggttggaggttgagtttgaacttgatagaggtgacttgagcgatggtttggggctcgatggggtccgcaatttggaggtctggtagggggatgcagcatgtagcgcgtcggaacccgtcgaccttctaggtttcgagttggggaggggctgcgacagctgcgagggctgtggcaatgtcgacattgaggccatggcgaatttgtatctcctaatgcgaaatggggatgtatttaatgggaatcagtgaacgcgatggccatgcgggcagattgacgaggtcgaggttgagcctatgccatttttcagagttagccaaatgaataagacgtgaggattgggcccagtcaaggcccatgagataaacggggattctactgcagtttttttcgccaaatgcagtcttggggggatcgtcaaaaaatacatcgcacacggatgttatgatgttatgattttggtctcgggtactcacggattcaagacgtgtgatgttgcaatcgcgacggggtaagaaagaagtggagatggagatcaaagaaagtcacgaaaggtaataaaagtaatgaaaagtaaagatgaagagagacgcgaagacgcgaagacgcaaaaacgcaaagacgcagagagatcagagagaaatgcaaatcgagtccccgcagaaggtcggggccagactgcgtgtaagactatatttatggatgtctgggtgttttatattacatcgtcttctctaaatccttatttcaatccttatatctatctatcattctctgctctgctcctctctccttctctccttctatcagtccccctagactcactatcatagctgagaaagcactctccttctcttatatctcccataagagccaagtatatgaaaaaggggtcgctaaaccatcacaccttttcgacgttaaaccgaagggggaattcgctgggaagctcggggcatctcatgtccaatgatagacagtggaggtttcaggttcgggtcaggaaaaagggggcgaatgagatgtttaagtctgcagttcgttttttttggtgggaccaatctcattatttcgacttcaaggtaggatcgggagattgggagctgctcctgttgtcctgttgtcctgttgtcctgccacattaccgcttgccctcaagggttgaaggagtagactccaggtactctccctctaaaggtgaagcttgggatgaactcctgttcgagacagtaccaaaaagataacggctattcgaatcaagcaaagattgacgtctaagccaaaattaaaattaatctgacgttgatcctcatttgcgtcccgttgtcccgtgatctgtatatctgtataactatgtacatctgcatctgctgtatacacttatatgactgcaacatacaaagtacagtgtgtaactaactaactagtcatatttatattggatctatttgtcattcggataacctctttttatttcaaactcaatctggaagcgaggaatacatctatgcaagggagcctatactcatagatcgcagccctaacttgaacagtgcgaacagtgcaacgtgatagattggtgatcgtggggaaaatccataaaatccctgactggaggacaatccaatagttgttgcacatgtcaatgtcatgcatatctaggtagtgtctcgtaatacacaatactattattagcgtgcttttgcttttctttgtctatactgtacatcgaatattgtattttgtctctatggtgtcattatttcataccgaaatccagttgccgggcagcactgttgaacatgccctcatccagctcgccgacacgtcgggtcaaatcatcgcccatctttttagtcccacccgatttccgcgggagatcttcattcttggtcggacggggttcaatggtccaccagttgtgccgcaagcactggacagccgtactgcgcttgcggggatcaagcgcacacatcgacatcagcaaatcggcacccaccgggcctgcagtggggaactgtcgcatgaagaaatcgcgcccttgcaacggtaccaaatgggccttgtcggtgggaatgtagtagggcaacttgctgacccctggccagttctcctctgttggtgtgccgaacgcttcgcagattttggaggtttggtccaggtcggtgttacctgctacgaagggaacccgtagcaggagctcggcaaagaccatccccatggaccagacatcgactgcgccggagtactgtcgcgcaccgtaaagaagctcgggtggccgataccaccgagtgatgacctgatgggtcatgttgaacaagggatcggcaaaggatcgggcgagaccgaaatcggccaatttgacctccccatctgacgcgatcaacaagttgttgggcttgatatcccggtggagaacaaagttctcgtgacaccaccatacaccccgggcaagcatccccatccaagccttgatatcagccacaccgtagtgaatgtcactatctttgatgagcatctcaaggtctccaccaggaagaaactcaagaaccaggcttagattttgatccttggaagagaaaacatcgtggagggcaatgacattgggatgtttcagctcttgaaggtacttcacttcacgaaccgcgtccatagcaagtccatccttgtattcggcattaactttgatcttcttgatcgcgacgagggatgacggatcgtgtcggaggtggccaacatataccacggcatatgtaccctctcctacttttttgtctagttttaagttagcaaattgatccttagaaagtaatacagcacatattcagctacctttgacgtatcgttcccgaatatcgatatttaattgttcggtaagttcgcgatccccattctgcacaggctttgccacagctgcagctgcaggcccagtaattgagttctgtgcagcagtggctctgagtctgattgctgtatttggggaatgcacagtcatggatggcgaacgagagccgaagggtgagagtgccatgattagaatgatttgaagcaaaaagtcaaactcctgggatagacagtatttaaaaaaaaaaaacagccacagatactgagtggctattcttaatattaagagatcatctttagcaaaatatcttctaaagtcaaggcagtagtgtcaagacatgagggccgatgtcattcccaagataggctggttcggagtattgttgatcctggactttgttggcgactcccgaaatttctccaagtccgtcaacagcgaccccagccaattcctcggcaactgctggaaaccagtcaatctcaaaggcctcgctcagcagttctcctcatccacaccactacgaatccaattttccggagaagaaaaaagtacagttacgagcaaagtcggggcttgcagcatccttcccgcaacaccttcactatgagcgtcatggcaatgcgcaattcgccgctaggcagcttgacagcgcgcctattcaagcctgtttcaatttccaaccaatacattcgatcactccacaaaaacgcgcccccgcctgtgccatctccgacccctttcgttcccgacgttcagaccttcctcacgctgattggccgcgaaatgtctaagcaagcgagcaagatcccctcatgggaagagcttttcaccttaaactcgaaccagctccgccaagccggcattgagccagcccgccagagacggtacctgatccggaagcgcgagaagttcaggaacggactgtacggccctggaggcgatctggagactgtggttgatggtgttgcccaattgcgggttgttgaagtgcctattaatgccagaggcctgacacatgaaggcgcacaaacggcagttcaaacttcttctgctacactgtcacccggcatggtgaaagccattgttaacctagcgcctgatgtcactacgtattactatggcaaaaaaaacctgatcaagaaatttgcgcatatgaagattcaccgtggctgtcagccgatgggcccgttccttcagcctttgaagggttccaatggtactgctgctaccatttcggtccaggagggtatgtgggaggacaagcggggacataaggttgatggtggcgagcgacgacgccgggaggtccggaacaagaagaggttggatgagagaaagaaggcgtgaatgtgaacggtgaaataccactttgtgtatcttgcatatttcctgttgagcctggatgttcaaattcgaactgtactatactattgctatactattgcaatcatgattctttttccatattctttacatcttttacgtgttttctagggaaagaagcgagatgttgttatgtgcctgattaaaataatatgactgagctatgtaaacgtttagagaaacatgcgattcaaagccgcgaaaggtggatggatattcatacaggaaaatcgtttcggagtgaagaaagagtaccatgatgcgagagctgtcaattccaggcggacttggctcaaggtcagtctgaacctttgatgcatcaatgcagagcattaaaaatgtgatcaaaatttgaatgagaatcttttctaaaccgttactccgatcatgctttgactccacgtctctcatactgaacaaatgatgtacccagaggcttggagaagagggactagaatatggttagtcaaatgccaggtcgatcgcaatagggcatcacttaccgaatagtccgtctcggggaagggtgtaccggcgataggcgtggagaacttgaagtgtctcaccagcgcagccaggattgtgcccagttgcacataggcgaactgttcaccaatacagcgatggcgaccagcaccgaaaggcagataaggactgttggtgcccttggttaccaatccataaccatagtcgatctgctcctcatcttcatccttggtattctcagttgaagcctcatcccagcggtgagggttccacttcagaggctcggggaagaactctggagagcgagcagtaacaccgggagaagagaggacattgtgagtggtgggaatgacataagaagtgccctccacgggcatggggttcttgacggcgcgaatgatcgagtggataggagcgtggatacggagggtttccttgatcaccttagcgtgcaagtcgagcttctggagtgcttcgtgggtaagaggaggcaggtcagagcccagaacctggagttgttcttggtaaagctcctcaacaatctcagggcagctggccaggcgcagaacaatccaggcagcagtagaggacgaagagtgctggcccgccataagcagcgcaatcatcatgtgggcaatttcctcatcaggaatcggatttccattcttgtaggtgcacgacatcaagttccagaccatatcctcggagtccttcttatcaccggctgcgcggcgcgccttgatgatgtccatgtacgtctcggtcatcttcttctgcgcagcatcgcgcttgcggttgtgagggagcggggcccatggcagcatgaagttgataggagcgaaacccttatcgaggtcgtggtacatttcagcaaaggtcgagtcgaatcgatcgcggacttcctgtccttgcaacgagcgggaggctgtgtaaattgtgatttccgcaatgaccttggaaacattgaaagtacccttagggtccttgaacgcggaggagttcttcacaaagtcatcgacctcattggtgatcaagtgaacataagaccgaagtgcctcggaggtaagcccgaatttgacaaactaggcaacaatcagcagcccgactttttggtgtaatccattcctgcataccttcttctgctccatgagcttagcattggggcaatcgtagacgacgtgacgaccgaagacgggggtggtgaggggggagtaaacctcttcggcgttcacatcacgaagcttgccattgagaataaactcatttcccttggtgcctaggtagacggtggttttcttgcccaggaggacaaaggtgaagatgtcgccatactgcgtttaacctcagattagcaattgaattgatccatgggccagccagacatctgcgatcgacatacctttgcgcgagcttggtcgaagaagttgtatgggttcatgccatagctgatggtgcttccaataaaggggacccagtggaagaccacggggggctcatgggatttcttgaagaagagctggcacagcacattgatcacaatcgatagcgcaacgaatgacagtgccccgacgctggccaaagtgtagattgactgggtcgagcagtgctcgcagaaagtggcgaggaaagttgcgaagaggcccatgttgtcaggagatcaaaggagagagagaagaaaaacagcgggaaagggaaagaaaacgggctcacaatgaccctacgaccctgtttgttcgtccaattgaataataaagaaagagagaagaagttgagtgaaggttaaacaggaggcgaaggggaaaataattaagtccgatatcattcggcgagagagacccgcccctttagggagtacgaagtacggagtatggagtatgtgtctagaggagacgccaagcgatataatttgcatcgtaagttatattttatttcttatttggtgttagtgaacctattttgtgtctattttgtgtctgcttgtgtctattttatgaattatctctcttttatgtgatagcattggctatatagccacatcatgccactccggtcaaggggttcccgctagatgggacgtatattgactattgggagtatttaaacacacaggacggagtacatatcaaactattagcgtatggagtacctagggagtacatagcatactatctcctcttgtaaatgtatcatttcacctgattttgacctaataatacatgaaccctatccttttgacacgcccctagccctgataatgatatcccgaagtacacgcaaaagtcaataataataaatcaaaagttgcacaaagccacacagtaccccttaattgtcgtacaaggtgggatcgccacgctctccaatgttgatgaaatctttcggggcccggttgccacttggtgagacttcacgttgggatgccttggctgggcggttatggacacgcttcccggcttcatttcggaatactttgaccggttcctcgctgccttcggcgtgctcgctgaagttggcatcgttgatgctgctcaacaaggtccgctcccgttgcaatttgcgcttcgaaaagtccagtttaccaatagcccccgtcaggccatctgtgctgtcagtgagactcgggtactttccggtcatccaaggatgctcaagacactcatccaccgtgattctcttgtcgacgtccacggtaagcattctgtcgattaggtccagagcggggtcgccaacggagtcccagtacggtgacggatagtcaaacttgcccatcttgatctgctgggcgagaatgaatgggttctctggagtgttcagttcatccgagaacggcgggaagccacagagacagatgtagagaacaacgccaagggaccatacatccacagccttggtgtatttccggtggcgggtatcttgcaaaatctccggcgcaacgtctgcgaaattagtattaacactgcggttccaaggtcatatgctttgtgacttacagcttggtgtaccgcagctggaagcgaattgttagccatcattcacattgacacggacagacatcacctacagggttgtcgtgaaagattcctccccaataattttagccagcccgaagtcacccaatttaacgttcaaattcctgtctgcaaccaggatattttctggcttgatgtctcgatgtacaatacctcgttcgtgctgatgacacgttagctgacccagtactgtatatgtggacttttggtatgcataccagatatttcaatccgtcaaacagctggcggaacacaccacgagtttcatcttcggtcattttattattgttcacaatccagttgaacagttctccctccggtgccaattcaagtaccagataagcgccgccactttcatcgaaggattccttgagacatagtagattcgggtgatgaacgcccatcaacaacgcaatctcttgctgcagagcattgtcgttctgtgacttttgcgggtcactgaggcgtctttcaaagactttgactgcatacttgtctccagtagatcgttcagcacacagatagacggttgcaaagtggcctttgccgagctggctgagaatccggtattgctgacggaaaccattcgtttcccgagtacgggggtagcggaagacaaaacgggcttcattcagaattgaaacttcatcgccgtcctccagttcccggtgcttgttacgcccaacaatggcatcattaacaaatgtgccattgctagagagatcctccagcacagcaaccacatcgcctttcttcttttcggcaaaaataaggaagtgccggtttgaaattgtgggaatctcaagcacgcgatctgactatagttagaacagacactcgacaaccatcaagctattacttaccgcactcaggatgacgtcctaccaaaaatccacctggcgacttagcgctcttggagatttgggactttttccccttggctttggtagtaccatcatcattaccgcaaccattgcgcgtcctcagcacaagtgggccattccccttctcatccagtggtagcaggtagccccagaccccttcagcgtcctcatccttcacatcgtccgcgaatgctctgggtggatacacgaactgtgaaagcgcctgagtatcctctaatcctggcggcgaggaagtcgcgtgttcgggttgggatgagatttgttgatggctgttgcgcggactttcggggggtgtaacagtcacctcattatgagtttctgtggtgacagattggggaccggtgactggggttggcaagtagttcaagtcgactggcgtgtctcgcggttggacctgactcgagattctttgagagcgtcgaggtttcttttggtcttgtgaatctgcatcgatagtagcctatagtaacccctgtaagaaaatgagttgcgccaataggaaaaagaacgtacccttcctcgcttgagcgagcttttctcgcgggggggcataatacaggctattatcaccctgactggagagggctccagaccaattagcgatagttgtcaattcaacggtaggaacgtcaataaagacctttttcgatgccgtaaagaaaatacacaattgtagagggagaaaagaagaagtaacgaagaaagatatgatagtctatagcatgtttgggggaaagagacccccctggtgactctccgccccaaaattgacgagcgcgaatatgagaagtaaagatatgtttagatatggtattgaagctctaaaaccattgaatctgtaaacaatactgtatataatataatacagcatagtatagtatagtccaactagtatacttcatgtcaacaaataattatgttgttcggacctaacacgtgctgtcccctgacttcattcttcggctttccacccaacctttaggcccttaagtccttcacaatggacgggtatgtgagattcttcaatgcttagaggatcatgctaatggacaatcaaagcctttcaggtggaattagacgtttcgcttttgaaaagctcgctgccttggcagttgaggcgcctgtcaatggatcggagcttgctcgcctcgcggagcagtctcagtcgacctccgagtctgatggcgctctgaatgaagtcttgagacaacaggccccgacatcgcaggttccaatggtttgtccctctattgctgccgacccctggtagtgtagtgggtgcaggctaacgtttggacagggaatccgtgaactagatgtcctcctggccctatgcaaggcggcctcctccgtgaacgatccagaaaatgctgctcaattggcattccaactctcccggtacctgccagaatctcacagccagctattccggtcctcgcccttcctccatggcgtaaagccgtcgccttgggagactctcacgaataacctggctcttgcgcttttgtcgttaggaactaaatatccagacctgcgacagacaactctcgaagctgtgcacggatatttgaacaactgcgccgaggctatcgctgcggtcacgccttttcaatattctagatctgacgcggggcgacagggtgttatacatgaatctgttaccgttttgtcaatcgccgtttcccttgttggatttatggaagcatccgcagaatacacttctatctggcatgcgagcgaaaagttacaggtggtcgatcatctgcgagcgatgctgtccgagcctttcctaatcgcggttgagacggcttcgtccactcttcgcaatgcaaacgtcgcggagcatgctttcagagactggagaaaatatacccgtcgatatgctgctcatgctcgcccattaggtgctatgcttgtacaagaaggctatatgcgctttgtgaaatcatgcgcatcctctctgatcgggttccagcacctaactgatgagcaactcttggatgactacatgactggcgttgggattgccaaaagttatgacgaggcggatatctctctagtcgaacgcgtgacggatatcattagtgaggaaattcacttgctagaggatggctccgactacctgcaagtcgggtctccttggcagcagcaccttgccttctctgttaaggggcatgccctagtaggtttccttaactgcgtgattcttggagaagatgcaaacaacaacgaaatactgctatcctggctcgaagatacattgcttgacccccagcaaatgtcgaacgaggaactatctgtgacggttctgaagtgtaccgctatccttgcaaggatgtctccaaatggtgcgtctattggaagacgctgccttttgaggtttctggcccaggggggtgtctcggctcgctccaccgttgccgtcgcttctcggtgccttgctcagatattgactattctttccgaggacgctgtaatcactacactttattcacttggtaatgcgataagcccgagcacgaacgtggaccaatctagccaagaccaactcgttggggatcataccgggcccgggatgaacctcgagacatacccaaaaaatgcaagccagacttcgctctcggcaaatggcgaagatgacactatcacctacaggaatgtcattcatgccattgtgacagttgcgactaattgcaacgatgacaaaatcagtgcattggcccagtctatgctgctccaaaagattggcaagctcaatgtcgcagttgatgcctttatcatccaggaaactgctgttcttgctttgagtggcggacaagccgagttccagcttctgttgaagttctatgcacgtatctacctagatggtgtcaacaaaggactgagcaccatctctgatgctgtccaatgtgccatggtttacctgtcgatcactttggatcaaaagtcaccactccacaggatttatctggtccatttattggaaagcattatcaacaagggtgatgtgccagactttgagtatgagcggcacaaggaaattgtttttgccgcggatgatatcacccccctcttgaaaccactggctctgctcgtgtcttccaatggcagttctaccgggtctgcccggtcagagtacgatgaagccattctaactctgttccgagatgcttggttcaatatcgccatccatggaatatccctcagctccagtgttgcccagcggcatcacaaggaactccgccttctcgcacatcattctccacctttggtggctgaaaaccacatggactctctggagagcgatgtggaattgaacacggtgcttagacgcgggatgggaccgcagcgaggcacggaacagaagagagctttgatttctgaactccctggccgagaatctgatatcaagaaattggactattcaggagcagtgtttcttaacgctgtcgtcttgatcgagagcctccgcgcctcctcaggggactctaccaagacgcttagttatttccttgacccagccttggccaccccggagatagttgtgtgcatgaatgctgttgcagacaaagcggttacttgttatctgtctcttacactttccggggagcacgatgacttttcgaccccttatctgtctaagcagcttgccggattcctggtggcttgctgtcatcgtattgagagggttcagagtattgcaacgcaatgtgccgacagaatcattcgtgaatgcccttctgcattgtgcgaaaagcattcgctctttgctttgcttgagattttgaccgtcatgtggtcttcctgtcttcaaggagaacttgatgagtttgactggaagccgtccttggtttctcccatgggcattgtcaaggtcgaactgcccgacaactatgcgttgagaagagcgactctgaatcggttccatgaacgagccagaatctgggtgacaaccgtcctaaacattgccccattagatgtcaaagggttactccagacctatctttccgaatatgacgacgacggcggctatggacacatttcgatgggacgttcattcgctctcgagatgggttcccttatcccacaaagcgacccacggcttgggtcgatcgatggctacggaagcagcgacttcaatgtcgcatctgacttcatggcactatatacgacacgccagaagtaccgacgtgcggacatgccttctctcggcggcctaggagggaatcttgatagcggctatgttgaacagccccgcgttaatgttttgtctgagtctgccgattctttggaagaaaccctctctcgtctatatggacggagcattgctggtgaggatattccccttgtggaagtgagagatgtccttcggcaggctgcgggacttatttgcagcagcagcaagccacgactctctgtggttcactacttggttgctttgcctttccagattttcaccaaggagatagtcaagcttggtgtgtctctctggcttggggtcattcacgagaacccaagcactgagccacggatcctttgtgaggtgatagaggcttgggagagaagcatgaagcgccgtaaaggattgttcgatcctacctttgaatacattgacccaatgtatactaagattgaacttttgccaactgacaaggatgttatgcttcgtacgcagcaaaaagctcaagacactctctcgccgcacctgcgagttctacatttcttcgagagccatttcaatgccatccgcctaggaaacctgcaagatcaacagctattgtgtcgcttgattggtagtacggctgttggactttcaaagaccggggcccatccattggcaagagaaattcatttccgcattgtgctccttggtctcacggtcctgaggcatttcagcccccgaaatagtggcgcatcttggaaactaaaggatcggattctgtctgctgctttgagttggtttaggcaccctccaaggtggtcattcggaggcaatcggctgcagattaaggcagaggacaaaattctcagcgaggtgactgcggctttacgagctgtggcaggtatcgctgccaatgcgcaagggtcatgcaaatctttgcaagccaaacaagacctgcttcaaatcctcgtggagaatgaacgatcacgccttcgagtttggctcttccccctggaaccggaacgaaagcaccatatgccttcgattggtggcaaaaatctcgatgacggccccgtatctttacttcggcttgcctgggcggaaaatgcagggttagctattcagatggctgcccggttcccgtcacccaaaatgcaggctgatgttaggtcgctgatactcaatttccccgagaaggtcattgaggagccaagcgctctggagcttatgtttgacaactgtctgcctgctgatgtcggttctcagttgaaatacatgctatactgggctcctgttactcctacggaggcgatcacatacttcatgcccgcttacggcaaccatccttatatattgcagtatgccatgcgggcgctggaaagctattcgatggatgttcggttctactttgtgccacaacttattcaggccctgcgctacgatgctctgggttatgtggaccgctatatcctcgaaacagccaagttgtctcagctgtttgcccaccaagttatttggaacatgaaggccaattcctataaggacgaggattctcagattgtaagtattgggattgtcaacttggtcaccgttagctaacatcctgtttcaagccggaccctatcaaaggaacactcgaccgtttcctagataacttgatctcaagcttctcgggcgaagagcgtgcgttctatgagagagaattttcgttcttcaacgaagttacggacgtctccggcaaacttcgcccttatatcaagaggagtaagcctgagaaaaaggaaaagatcgaggaagagttgcgtaagatcaaggtggaagttggagtgtaccttcctagcaaccctgacggtgtagtcattggtattgaccgcaagtctggcaaacccttgcaaagtcacgcaaaagcaccttatatggcgacgttccgcatccagaagacgagatcacgattgattcaaaaggccgaggccaacgctggtgaccatcaccaccagcgccaattgacgaatcattccgagcctgagcaggagacatatgaagtgtggcagtcagccatcttcaaagtcggtgacgattgtcgccaggacatgcttgccctgcaaatgattgcggccttcaggagcatcttcaccagtgttggtctagacgtttgggtctacccttaccgggtgacttcgacagcgcctggctgtggtgtgattgatgtgcttcccaactccatttctcgcgacatgctcggccgcgaggccgtcaacgggctctatgactacttcgtgtcgaaatatggaggcgaggactctatccgattccaagaagcgcgcaccaacttcgtcaagagtatggccgcctactcagtcatctcttacctgctgcaattcaaggaccgacataacggaaacattatgattgatgacgccggccatatcatccacattgactttggattctgcttcgatatcgcgcctggtggcgtgcgattcgagcgcgcgccgttcaagttgacctcggagatggtcgccgtcatgagtggaacccatgacccagctcaccaccagggtggtaactcgggcattaacctgccaggcagctcccacaacccaaccaacacgcagccataccgatggttcgagtcgttagtagtgaaggcataccttgcatctcgcccttacagcaccaaactgggcaacattgtctccctcatgcttgacagtggacttccgtgcttcaagcccgagactctgaagaatttccgtgaccggttcgtgttggagaagagcgagcgcgatgcagccgagtacatgcgagaacttgtgcgcaagtcgtatatgagcgtgtcgactaagggttatgatcagttccaactgatgaccaacggtattccttactaagactatgtagatgttgttttacacttacacaagacattttctccataaatatataatgcattcatcatgttctgtcactttgcccgaagtgtatggttgacgtcacgacttcgccggcgccacggcgtactgatcgggccatccataacacccctgatatcagagataatccgcaggaaataggatagaagatatactaatgaaaatgcactgtaaattcggcatatacagttacctcagcaatgatagagatacctcatatataacagacttcagggtggcacattcaaggcacgaggatctacacatcgtggtgccggaagtggcaagatgacgatgcgaaggcactggacttagatcagacctttataatgtgcaagaatccttgagtgcagtcccaacatcgaacctggatacatggaaattacatattcttactgtatataataaccaccatctcccatctcaaggatgagaatctcattcctcaataagctcagcggtggagggacagggaccaagtccccgccattgacggacctgtcgggagagtcagcgatagcggatcgcgaaaagagaggcagcaacatggacgagtcgcgtgtgccatgggtgacttggagatctgtgttgctaggcgcatttgtctccattggtggtgtcattttcggatatgatactggccaaatctcaggctttttggagatgaataacttcaagcagagatttgcgcagctgaagcccgacgggacgtataagtttaacaatgttcggtctgggttgattgtttccctggtgagtctttgaaaggcgaagtcggaagatgcgtgaatgtggcaaaagctaacgctttccagctctccatcggtacattgataggagctctcctcgccggaccacttaccgatcgaattggtcgaaaatggtccatcttcttctggtgcatcatcctccatgtcggactgataatccagatctcctcgccaacaggaaaatggtaccagttcatgatgggacgattcataactgggttcggtgtgggagcctgttcactgctggttcctatgtaccagggtgagattgcaccacgacacatccgaggagcgatggtgtggtaagtaacaatccaatactcaacattgcaagatactgaccataaccctaatacaacccagctcctaccaattatttgtaacattgggcatctttgtcgcatattgcatcaactttggcacagaaactatggacagcaccgcatcgtggcgaatcccacttggtatcacattcctgtgggctctcgtccttggaataggtatcctcctcttcccggagagtccccgcttcgactaccggaatggccgtatagaccgcgcccggcgcaccatgtcgaagctgtacggtatacccgagaatcaccgggtgatcgtgcatgagattgccgagatccaggaacagctggatgccgaggagggggcgcaagacgggatccgcggttggcttgagatgttccaggcgccgcgcatgacgtaccgcatcgtacttggtgtagtgcttcaagctctgcagcagctgaccggtgctaactacttcttctattatgtgagtgttttatttcgacatagacacccgcactttgctaatatatatagggaacggtgatcttcaacggggcagggatagacaacacattcgtgacgcagatgatcctaggcggggtgaacttcggcaccacattcggcggactatacgtgatcgagcacttcggacgacgcaagtctctgatcgcaggcgggatctggatgttcatctgctttatggtgtttgcgtctgtaggccacttctcgcttgacgttcagacaccgcggaacacgcccggagcgggcaaagcaatggttgtatttgcgtgtctgttcatcaccgggtttgccatgacatggggcccgatggtatgggcgattgtggccgagctgtatccatcgcggtatcgggcgcgggctatggcgttggcaactgcgtcgaactggttatggaatttcctgattggattcttcacgccgtttatcactggcgatattgactttgcatatgggtatgtgtttgctgggtgcttgttcttcgcggtgattattgtttacttctttgttatcgagggcaaggataagacgcttgaggagatggacatgatgtatgttatgcgcgtgccgccgtggaagagcagcaagtggaagcccccggagccggagaatcagctcacgaccgatcagcttatggatcggaaggttgcgaagaaatttaacaaggaagaggaggtgcctggacattcacatgctgagactgcgaatgatgctggggctggaccttcgcatttctcttgagagttggccttgggtgaccttggggtgacacgaagagttgaagtggtgggctgtggcgggctgtatatggaccgaaggggcaatgaacatactttcagtgtatatactgaaaacaggagatgtagagtacttcaaaatgtagtccgataatgagtgaccaatgggtgtcaatttggtagtcataagaataaagtcatccgcatcacctggatgggatgggtatgaaataggctcaaatatatgaaacgctgatcccagagctgaaaaaaaaagactcaaaagttgatgacgctccatgaatcaattttttttttatacatattccacctattttcaaagaaaagggttgggaagacacatcgagaggatggagaccctagaattgatacaagtctgttgagactttcgacgtcaaatgcagaaaaagtaaaaagaagccagaggaggcccagcagcaccgatcgagatatacttcccttgaaaagtgacgagaaccaatctctaatccataaagtcacccctcaagatcttctcctggaagaaatccggcttattctgcttaggctgacggggaatttcccggctaggctgctccatagatgcgatggaagcggcacgctggtggttaccattggaacgatgtggggagacggggccgccgaaggaaggggcacgcccagcacgagagcggagggcctctgaccagttaaagccttcgcctaagggtcggcgtgatacgttagatctctcatccggaggcgaggttggagtacttgcggaagatcgggtggtaacgatggccgagccggccggaggggaacggcgcgggcctacggcagacggaggggggtagtttctaccatttcctatgctccctgcacgagaatcacgcagagcttgtgcaccaaaggagacgcgtctcccgaactgcgagttgggtgaggttcctgttatttgctcgtcgtcgacagcatcttcgactggaccgttggagcccattgagctagataggctgcctcgacggaagttgcgattgccaccgaaggcggacgcctgggtgggagaaccagagaggcccagcgtgttgattgacagccgacgctggttggattgctgacttggaacctgggttttggatgggttgctcggcttggagaatatgtcggcgatggacccacgacgtcgacggttctccgcatgggggaccgagatgggggaggttggatcgttggacattgtcaaaagaagggggttgaaccgagagcaggaatatagacggactagccgcccttctcatataatagaggatttgacaatagagatcaaagtgacgagaatgatctcagcacttggaagggtggggagggtggaacgatgtggaacgatggtggggggtgttgatttgaggacaagacaagattgaaagattgataccagaactcgaacaaataaaataaaagaagggagaagtatctggagaataagttgagaaaaaaagaagacgagaaagcgagaagggggaaatatcgaggttcaccgagtagagagagctaagcatcacattatctggggaaagtggcgctaagtggagtggtgatgtcgatggctgactcagcagtttctatttcatgacatgaggttattctatcagttattttatcagttaggtatcagttaggtaacagttaggtatcagttaggtattggttagggtattggttaggttattagttagggtattagttagtcgattggtttggattgattgttcaactgcttcaattgctatggccatctgaagatgagtacaagactatatatattggtacttcatgtacctattacctatataacgtctacaattgggttatcgtgcagaatgacaaatgctaatccctgcagaaataagggagagcattcgtattcgtagctcaagaaagtaaatatggacgtacatcgtgtattgcttgtttcccataaagtggcatacgtctctgattcctattccagaatgaatcccctctgtcgacatctgctatcataaatcatagaccatcaaagaagctcttgataaccgcaggaactaaagacagaggagatcatccacatgataagaaatcaggaactcaaggcaaatgaaacaactgaatcagcttacgcccgatcgttggctcaatttcggtaccgtcacgagcgattttgatttcccgattcgcattccaagggttacgaaggcctcgagtgcgctggaaaggtactcgctctgtcgaaatccattgaatgcggaacggtttccaaaggtttgaccctcttctggatcctcgggctcgacgcttttctcgctcgcattgtcgttctcatcttccgatgactcgacctcccagaagatagtaccccgcactgaatcatcgatgattcgtccttggggcgctgtcgaagttgccgctgtcagggtcacgtcaagttcgtcgggcccgccgggcgggggatcgggccgagatggcatctccaaggccagttcttcgtcgtcgctgatcggcgacatcatacgggcgtatccaaaatattcgccagatttgttggcggagaaaattaaataaacgtaatctgtgttctgggtaaaggtcagtttcggtcattgctgggctacatagctttggactcacctcgaaagcctgattcattgccgcctcgttgtgcgactgtgtagcccaaatgccactttgcttgctcaactcgagatcctccactgtcaagctcttaacaataaagtaccgatctaccagccgggccgggggaggatggttccccgtagcaggcgctgcggaaccgggctccggtgtgattgaatggtcctcgcccgggtccgtagcagtagtcgtagcagtagtcgtagctgtcgtaatcgtagtcgtagccgtagcattatcctccggacgtggtcggagagcattattcggagctgcagacccggagcccggagcagtgagcccctttcgcagtcggcagacaacgcggacgccctgaaatcgggagtcgtgaaatctcgccaaagctgcaacgcaggcggcagccgacttgtaattcacaaacgcacaattactcttggagatcaggaacacgctctcaatgtcgttttttgcatcttgcgagaagtgatctttgagatcaatgacactggctccgggaggaagatttccaacccacagcgcgtggccagattgcttgggctttcggggtggtcctcgtggggtactcggagcggtcgggagtggttgcgaagggggagtattgtctttagatgaatgcaggttagtaacagttgcaaagtgaggggattcgacaagagctcactggagaacggcggttgtggttgggactgcgctatttttttggggttcgatccatccacgatggtctttgaaacgtcgtactccagatccgtcattcgtttatcggcttctttgcgcaaggtgaccggtttcgagggtgaactggtgttagtacgtactggagatatagcctgaggcatttggccggcaggcactccatgtccataagggccgtatgatgaatgagggtaatagcccgagctatacggagatacttgcccgggattgaggtttggcatgttttgcatttgggttccatgaggcgggtaatgatgttgaggttgagggccagggtgttgagggatggcatacggcggataagcagggtaagacatgccatacggcatgcctccggagttgtgtccatacggagtcattggcatggggtacatcatgccttgcccgtgggctgtgtactgatgcattgactgcggattatagccttgtggatgatggcctgggaagttgtatcccatgaccatatttaagggagagggggcggttccataccgagcttctgcgaagctggaatgatgtgtgacattgggacgtggcgctgaagtaggagatgcacctgagaagagatttagtcaggcaaagcttggacggcatttgaaaaggaagggctaaccctgttctgatatcggggctgtctcgtcagctgtcttgtctgaaggaacattgcccatggggccgttgatgaaactttcaattgtaaccttctgaaaactactgggtctttagtgtctgtagggaatggacacatcttactcgagaccttttccttacctaagtcacgtagcccggatgtcaccgcggtgtaggaattcttatagaaatcccaccgacgcaagtaagacttccctaagagtccggtagaatagaacagaacagaacagaacaccgtagaagaggggaagtgcaaagatctaatccgggaaggaaaaggcccaagccatgcaagttagttctccggattttgtgaagaaaatatcaaggatagaatgtgtgtgtgatggtaagaaattgaaaggggaagaaaaccggtcaacacggactgacccccctcctgttaggccataagccgaagctcacaaaacaaagtaggacaaacacatataaagggattctagataagccacggtggacagtgggctaggtaccagagacaggggaagcttaaggctaactgacagccaacacatgccagaggagggggaagaagtgctaggcatgccagggaagagtactgaattcaggtacattgcgagaacaggagaccatccccgttaaaaagaagggtcacataccgagtaatttggctagtgttttgtttcaagaggcgttgtgttactcgacgatggtctagacagaacctgtttttgggccaaatgggattgagaacaaaagagccgagggaggctggtgaagggagctaaaatagtgtagaatcgagggcccgagaataaaaaaagcgccccgggagtcagatatagggcagaaaaataaagatgcccaagggaagctaagggtaaataagagaaagttaacgttgcagagggatcttgttgatgggggaggtcctgatcctggccctggggggattgaagccaatcaactcttcttggcaggctgtggctcaatggcttagtacatattccaaggtataaaaaaagaaaagatataaaaaagaaaagaaaataagaaagaaaaagcgggatgtgctcgggaagtgtatactgtatatagcatttagagtcgctaatatagaactgggctatatggtcgaataggagattgggcattattctgaaaataatttcagaacgaggatcatgtcattcgagcagctgttgccgtatccctgagctgcaggttgccgtcttttttttttctatttttttgtgtcttccttttttcttttctttttgcatcctgtgatgggtatctgggcggggccagtacaatggtcgcgattggggcatattatgttgggcgtgaaaaaaaaattggaatgacttacacacccgaggagcctcttcgactggaaccaatcgaagtgagagacacaattgccactctcaggggtgtggcgaaagagtcgagaaaaccgcccagggcgaatggtatgtatgtatgagtgtgttccgtgcaacctgtacaacggtacaacggcacaacggtacaacaggtaccataggtacctatgtatcatatacctcggaagggccgaatgagccctgggtccaacggcctttggaaccgtaagaggaaggcaataggaggagctctggatacacactcctactatcatgattcgtagatgttccaatgggatgtttcacttctttgaaacgtagatattggggatacaatgttgtatattgcagtatttcgagttccagcccagtccagaggtaagagcgacatcgtgttgctgtacagtgggacagagcgtacataattggctcatcctgcccatggtaggacctcgcatacatatgtatgtacctcgacaaggcgattatgtactttgtatgaggtagtattgactgccgtttcagagtatatgccacggaaacgtacgtaccgttgggtgggggtcaatggagcttgatgatcctgtaaaaaaaggaagaacatgaatctggacatccagcaagagggaaacttcttccatgggaattgagccaattggaaaaagaaaaatgacgacagaagaagaagctaaagggacaaaaaggaagtgaagtcggatccacccggtttgaccaccgggatcgcatcccagccaatcagagcgggctattcgagactacatacatatcccctaaacaagagatagcagagaatggtactttgtagagtaacggaatacggggataagagcttatttatgtacatatatagtacaatgtatatagatatatcgtatatacactcagggtatgttataatttggctcattggacctatacccgcggactctttctccaaatcaactgaccagtcacttgagctgttcttaactgggtcatgtgactcaccagctctagtggagtactccaattgggttgtataacccggagatttcccgaaaacgggcattgacagtctctaatctagagaataaaagtacaattcaacttcgatcgaaggatgatactgacgacagtggagggtcactgacgcagctttgatgtaatggcacccatcttccaaaaaggtactccggcgtgttccagtagatataccatgttttgatgaagaaacaagccacgtccggacggttagggaattggcgatcagctcaaagactggacgccacattgacacctgaggcgtcactatggatttctgacgtcatgggcgttctccccacatctccatgctttctatactgatctatgagaatcataagcccttctgtccatggacgccatacaggggctttcaactgggaatcattcatcgtacgtatacaccaacacccgccagtcagacttgaccgtcaaggccgtgtcaagagagcgagttgacccattctataatatccataacgcgttatctattattagtggctttgtggctgtgctcctcccactacaaaaaaaaaacacgacgagcccaatcacggcagggatcagcagggatctgagtagggcgtctccattccccatccttcatattgtgattgaccgagagcgaattgttgcaatgtatcgactcttcacagccaccacatctccacctccacatctccatatatccatatatccatatatccgtctcgatttggatgtagtgaaaagtaggtgcttacacttccgtgtagaaaattgcaggtcttaccttcctcgggcacttctagtcgccacagccccacggatgtgcagtttcaactctatgatcgagatttcgtcagctgctggcggtcaaagtgtggaggcgatggttggtgttgccactgttaggtaactggtttctgcatgaccaggattgatcactgtgatatgtagtagatccgaccgaggtttccaaagctcgaaaagtacaagtctcccagaatggagagacgaaactacacatgataaaatagaatgatcaaaacgcagggcaaaggcaacagacccgactcatatttgaatttgtcttagaagacaataatgtgtgaaagtggtacgcaaccatccaaaagcaggattgagctgctagtatcaagaactgacatgaagaagtgaaaaagaagagaaagaaaccaccgcctggccctcatagaaccaaagggcgaaaaataaatatcctgaccatcaaaaaacggaaacaaagagcggcaggaaaatcaaaaaaaagtcatcatcagaggggaattttcatgcggaatctcattaaacactgatataattacgattacgggcggcgcggctgatgtgctagacggggagggtatagacaagatgaagcgcggggaggagccctttatcgatcaattccaagtgaagccacttttcccgcaaagcgagcgccagcgcttcctcttttggagagcttctctctgtctttgtctctgctgtctgtgacagttgaagcgtttgacgaagaggaagactccttgctgcggatagttgggagagagcccagggtatcgtttgcgtaggactttccacctagcggcggtggaggcacgctgaaggcagatgtgcgggcggtccgttggctgagatacagcttggctgcgggggagagaggaatggaaggaggttgtggcgggatctcagcgccgttttggactaacagctcggcgatagggaatgggatggcttttgcgctagatctcgcggcaagagtggttggtggggcgcctggggacgcaggatcggctgcggcaagggctaggaaggttgcgtgagtgttgcgggagcgatcggttatatttacgttgccacccagggcgagaccgtagaggacgccttggatgtcgttctgtttgattgacgcgaggagcgtttcgtcggccgtcgcgaagcgagaacgtggtgaaggcagattctcaacgtaggctcgatcaacatatttggcggtgatgaatttcaaccgttgctctcgtgtagaactggcgctcggcttgagagtttgatccaaggtcgcctcccaaatcatgttgctaacgcggttgccaatctgcaggagaatctcgacgatatcattcgagaaggaatgtacatccaatgtgagagagcgaatcttggatatatgcgtgcccagagagcggtggattccactacattcaatgcagagaatgattccaaggttgatggagacccattcaactttggatgatgatccgcaatcagcacaccagttgttgccttgatccgcatcccgtacaacctgcagaagctttgcaggattctcttcaaagttgctatcaggacggacatagcttgggcgcgcaccgacggttgttcggcggatgacgccagcgttgctggctgagctagaggaggaatgggagtggtgaccagacacagacgagcttttccctgttagggcggaaccaatatcccgactggtaggtctatcattcctagatgcggagggaggcggagtctcctggccttcaaccgcactctgcagcgcgttgttgatagccctgatccaattggacatgtcgtcctcggatgtcgcttggtaaatacgtttgaactggggtgtgatcacttcgaaacagaaccgtcgttccgcgtttcgagcttcacggactgatgccatgcgcagatcgatggggtccatgtgtagatccagcttttgtttccagttgctatactcggataatttcccttgatccaaaacaatccaaaatctgataaaattagaagttgtacaaccattcctgcgcttgtacttacttgtgccatgcttgcttgttgatacccttcggatcgatgtgagatcctggacgtgacagtgcccacaaaaggccttctttgcgctgttggctacttgtccgatcagatccgctgttgtgctcctcgagatcccggatacccttgaagcgattctggcccacattagcagccaccgtcgagtttgacgcgggtgcactgattcctgtagctggtgcggccggtcctgcatttgcttgagacgaaatcgatgaggtgttgctaatgactcctcgaagctgagagcctgtgctatcagccctaccaagctccacctcggtagaagggccgctattggcagtcccaggagggataggaggcacactagttgtaccaaccactacgtcgggctcaagatatgggttactgccattctccagagcccggcgcttctcttcgcgctctgtgcgctggaattggaactccttgtcggcctggtccacctcgtgaataagagcttccagctgaggggtcattccttcaacctttttggcggctgacaggaaattcttggcctggcaactcgcatatttggtgagatgtgagagaacctcttgctctttgcgacctccatggagatcttgcataaaggaggagtaatcaaatcgcctcagttcgaaatttcgccgcttggcttgatacttcgaatcgctctcggcacgcttcttctctttcagcgaatcctgtcgctggcccaaataccgactgacataagcgtaatagtcgcggctctcttcatcccagtccttctttttggcttctgcttgcttaatatcgttgttgtatagtttgaccagaggatcaatcaccagtttctgaagttgcaccgtgttgagctgctcgtagttcagaatttgccgagcaattttctcgaagtaatgatctaacgcgggctgaatagcatttgcattagacgtagacgcatcattcaatgacgttaggaactgttccatggcctcattgcaattggcttgcgctagctgcgcgctctcggctttcttgagcaccttcttgattttggttcgcatgttgcttgtcttcgactctagcgctttcatagtcgcccggaacaatggtccatcctccactccgctcatctcatcacctgcccgcgaatgtgggagatctaccttggctggtggtgggggaggaggcgcggacggcgggggaggaggtgggagagacttctccactggctcaggtggagtgatggatggattaacggtcgattcggcatcgctatagtgagatataacggattgagtcgatgaaatccgagagcgcggaaagacgggtaactccaggtgtggcgatgagatctgagggctcggcggaggacgcaaggagttgtgcacccagaaggaaaaatgggcgagagtgttaaggcggtttgttctttgatcgtaatccaagaagctgcagctgttgcgccaaccgccacctttgtcctctgttaccttcggaggcttccatcgccatgaccattcgaacgacacggacggggtacccccagtggagtaatctccaatcagttgaacattagagttattctgaaggttagggttcgcatggaactctcttgtgatcagattatccagttccttcgagttggatgcgtgagcgaacgtgagtcccgtgagactagtgtctgccacctcgggcatagtcgttgaaacaccgttgacagagtttggagcattgccagtcttcatctgacgaatgataaaggtaaacttgaagatcagctcctcgtcgttcgacaggcgtagcatgaaggtcgggatcggagcggtggagggggtgtcggggtcctgttcggtttgaggggacttgttagctagaagacccgatacatgatattaggtaccgcgtacctgaatatattcgatcggagtatcgtcgccagcatcgcgcttggctacgaaccttgccgccgggaacgcgttgggggatagagtcaaaagacgacgtcgtgagttgcttatcgtgaccgatgcgatcgcgactattgaaatttcatcagcatatcgacaagaggttcagatccggtattttaacccacaacgattctgatccttgaaaaacaagttccccgcatcgtcaaggcgggtggcaacattccccatgatggcaaagggatcaggtcacggcgcgagaaagggaccgaagtagcgggaccaatcgttggccatcgacggtctgcgaacctgtagtcggatggcctttgtattgaagtgtgcgaaggaaccgagtaatcattcagtgaaggtgtctaggggatgggagagagggcgagctcaaagatctgaaggaggggcgaaagttgatcggataaatgcgcaggcacccgaccccatatagtgccatttagtgtgaagcttctttttatttaaatattcttatttggtttcagttatatagttcgatttgtatctgttatatatcatttaatcatctgttggtttggacttgttcaagggcattatttaacaagaacatctaatgcgactacatccatataactagatataacacgactatagcctcacttctgactcaaaatgctataaatataggccaaacttatattaataggatcaactgtacaaatcaagaaaaacaacctggtatgaaaaattaatcgtgaacgtcgtgagactcggttccaaacccgagacccgggaatagaaaagaagagaagaatagaaaacaaaaaaatcagggcatcagctcgcgacttcgcttgtcccatgattgggttcagtgggaatcgcaccagtcgaagcagggcggcgctcacggccagagaagtaccgatgcttgtgcttatggccatcgggcttttcatccgcttctacccaccgcattacctgtcctcgtagatcgcgcatctcgtggactcgtctagaaagatctcctcgtttcttagattgaccactgcgctcattgagctcatcctcttccgagctggagattgacagtgaagacgcgctgctctgctgcaggaacgtgatgacatttcctgcggtcttcttgaattcgcgctgctcgttcttcagattttccattcgttccgcatccgcctggcaatccagagtggtaacgtggagtccggggaagttggaggacataaattcctgtaagagtggtagtttctcgccgttgggacggtaagttccactgtcgttatcaataaagagttcataatcccctggattggttgagatagtgatcccttcttcggtttggcccaggtcctcgccctcgttgtggtgctcatcttcctccacaggaaactcgtctgtaggcaccgtgctcgattctgcgttctctgcattacctgcattccctgcacgttcttcattctccgcatattctgcattctctgcgcgctcggcacgcccttctggggagttacggcgatggcgatgcttgcgccgccgaacgaagaattcacccgaatacgcgatgtagatagacacgtcactgtgcatggtgtgcttactcagcatatcaatgccaaattctttaccggtctcggtgaatcggatttgtccgtccaaggtgagcacataggtgaagatccgtccaccctggccatagtgcgcaaactccaaaaatttctgagagagttcacggcaaggcctttgaaaggacccatacaaggtagtacgatcgaaattgtagatgcgctggtgctgatgatggagtgttttatgcaggatacgccctcgtagactttgtgcctggaacattcccgccacgaagggcctgaactctacatagcgatggtatagctctgcaggtacagggcctgtgagttgcatctcaatagcctggaaactattcggagtcagtatatagatggcccaggggggaagggaaggaagacacacttgtaacgggtaatcgacttgccactgccatctgtgctttgaacatggtctttgatgccagccagtcgtccaatcagaggagaaaaatgtttgaaccaaaagttaggaccgatagtgtacatatgacccccctctgtgccgggggtttttccgagacattcgatgctgaccaccaaccaggactccttacggtgaccagtcgcaaacgcggagacattagtaaatacgtagacgcgcttgctcccaaagcgctttttaaccttgaaggacttctccttgaaacctgcccagtcgtctgaaagtgcaggaacgtcgataaaagcaatccccagcttatcgtcgtgatccgtgggatcctcgtccatgagatgacatttcaactgaaatcccgaagccggaacatttgcgatgatccagtcgcattcccacatggggtttatgtccctgcgtacggtcggagtgcggaaatgcacgtcggggtcttgtttgtggcgcgtcggtaggtcgactaccatatgcgcgtcgacataaggatcggaggagaaactgccaaagtccgcgacgggcaggtcttccgcgcgatggaaagtgatcttgagggtgtagcctggcggggcgtggggaaacggagtgggatcatagcctccggcaggctttgactcttcattcgtagtgagccggcgatgtatcttgtcagccttctcgactagtttggggccaaatttgtcgacgggatggacaggcaatggctggggttgggagtcatccatggtgagtatagggggggaaacaaacgtgggaaatctcttcccagagataaagataagtaaacctgaataatagtcatggaagagggaagggaagaagagagtggagagtccaagctttttcagccttacaaaatgaagaaccgtgtgagttccctcaagtctcccctaagggccccccaataaggaaagatgagcgcaaggcaacagagattataccgccaagcccttgccaagacctgcctagcggcaccggataacgtcattgggctttgtctggttcccgcgccttcttttcagggggtcccgaggtcagccctatattatgttgatgttgtgcatgtttacatatttatcttctctatcaagtaacttgaaatacattaaaggcaaaaaaaaagtaagatacccagaataagctagaacacatcataatcgtacacataccgaaataagaataagataataggcattaggtcatgagtatcatgggggaaaagacaactccttgcgcgaggactgacgaatgtggcgtataaagaaaatggtttctctaagttcctcggaagaggaattgcatgtcctccggggtcagtttttccaatgccgccgcttgatctttattcagggtaccccggatgaggttggccttcttctcttgaagttgaatgattcgggactcgacagagtcctcgatacagagacgagtgaccatacaaggccgctgctggccaattcggtgactgcgatcggcgctttgccattctgccgcgggattccaccatgggtcgataataaaaactcgggaggcttccgtgaggttaagtgccacgccaccggccttgagagagactaagaaaacctcaacctcgggtttagtcatgaaatgttcaatggacttttgccgctgtgctggggtcatcgatccatccagcatcacggtgttgaatccggcatggcgtagccgccattccaccagttgtagcatggatgtgaactgggagaagatgatagatttaggggtgtgacttttgcttcgctccttgaaaagttcataaaggagcatctcgattttggtggaagaggtccagctctccatggagatgcggttgatgatggaattcttcttgacagactcttcgtattcggcaagggtaggttgttccaaatcgatggaaagggcaatatggcaccgtgggcagtcaacatgcttgctatcgtcctggaatgactgaatgtagtccttggcacattgacgacagaattcatgacggcactgagaccgaatgccatcttctgcgggctcgtcacagatacagcatacagcaacgttgaaccctaattgcgcttttttcttcagaatgagatcgggatggtttgcaacttggcgcatctgcatgatcaacccgaagatgttggcatagttattcaacatgacaccctcgctgacataggtgtcgaattttcttgtcgagttcgtcataatgctgcgtgagaaatcttgttcgatctcaccgaaaaattcattgtgtaacatgatacgtttaggtgggagctccatcgacgttgtatgctgttgcttcatccggcgaagcatgatatgatcggtgatgagacggagcttttcgagaccctctttacgttgccgctgagttttcccttcaataattgggttaagaatctccttgttgaagatcgaaatatgcataaacccagtgtgagagcactcagtacaacgcccctctttagtcgaggtccactggagttgttcgcaatcgcactgcttacaaaagtagcatgcaaatggcttgacttgtagaaatcgcagaagggagaagaattctccaatccggttctgtacgggtgtgcccgataggcaccacttgtaattggcctccaaggcaaaacatgccctagcaacacccgtggtacgtgatttgatactatgcgcctcgtcaaggatgaggcggtgatagtggactgcgtggatgacactgtctgctttgaccatcgttgcaccgcgagagaagcctttctcctgcttgcggtaaatggattcgagacttgcgtaggaaatcatgatgacatcgtacttacgaatctcagccggcgtcaactttttgattttcgcgtccgagttgtggtagaccaagaccttcagcttgccatccgtgtattccttgatctcggatacccactgcatcaaagcgaccggtgggacgagaacgagggtcgggtcagactgggggaaatcggacatgatgagtgaaactgcttgaatagtctttcccatgcccatctcatcgcccaacaaaccacccctgtattcagtcttttcctgagctatcatccagttcaagccctctagttggaatggcttgagtttgcgagttatagagacaggttgcttggcttcctttggctggatgataggctgtgctttgagcacatcccacatggtaccaactgtgggatgcctgtacacaaggttctttcggtctttttctacctaggggatggttagtcatggaaggcacgtgggaaaagaaccctcggcttacacggcgagctttccgctgctcttcccagctcgggggcagatctgcttcagagtcgtgcagatcgtcatcgagaccgtcctcaagaggatcttctgatgtatccgaagaagcaacgccagaatgaagtaacccaggtggctcagggctcaacggagagaaggacactggtctagaatctgggtccgagtcgtattccaagtgttcatcaacgaatttgtctacgagcgaaccttgttctgttgtcgggcgcgggtagtcgtattcctccatttgaagggcatgagccagagccgcatcagaagtctcaagatcattttggacagacagagtacccataggccgttttaccgccctttttttggaggcatgagttagtgaaacatcggaggcaccagtatcctccgccagtgccgctgcggatcgttttcttcctccttgggaagctccaagggatagtgcgctcgactgtagtttctttacgcgatcagcggcattgatacgcgccgaagtctttatcgcaaccttggtgtcaggttcagtaactgcagcaccaacgctagtagccggggtactgcagcccgtggtcagattccccagcgaactccgggaattggagtcactgggcgattcatttttcatgggtaccaccacctcaatcctgcccgaagcagaattacccggtgtcaccgaatccacgacatagtcgtcctcatctgcctcggaatcttggatgacgcgagggcgagaacgagaaagggatgacccaccagctcgcagaggtgccgatcgacttgatcgacggaggggggatgaatttcttggtgacgtctcgctgaactgtgaatcatcgtctgaatcagggattgtggttctgggtctcagattgtgcctcatattggaaccaagcgaatataaagagggcggtaatgagactagaggctggaaccgggcgtgggatctcagctataacgacagatctcattagccgcgttcaaaatatatagggaagtgacatgggggatgtacctagaaaagcgcgactttgcttgcttgtggtacgaatgtgatcagtcgctagacgacaggagatgggataaaagctggtataagccgcaaattagagaggtaaataaataaatgagagatcaaaggaaacaaaggaggaggatgagaagatggaaagaaaatgaaaggaggatgcagtcgggaggcagcaggtgcctgaaccagagaaatattttcctcggaatcttccgatgtccctttcagttccttttcttcttttctttcttggtggcaaatcatcatctccaaattcatcaagtatcaaaggtctctacatctctcttcttccgcataattccctcctattcccctgtcttccccatcgcccaattcttatctcagataagaccgcgttaagtgaaacgcgaaattgccacgggtccagtgactcgggcccagaccgacttggagcctcactttacaacctccaaatatgtgagtagtgctatcctttgtgatattatccaaactgacaagtcaaaaaggacaggaaggagacaggcaaggcggacaagagagccaaaccagcctcagggcattcggggcccgtatgttttgcttcccataaccttatccccccccagagactcactgcacacactagacgctctgccttgaccgactatcttgctgtatgttgatgttctcctacatattatgacttggctgactggttgtagtcaaataatatctcagcccaacaaattcgtgatgattgggaccgccggcaagccgaggcgcagcgccagcctgatcaagctgaacaagaatcatccaatgcagctgaagaatctaggtccccatcggtcttggagtcactagatgaccctataaaaaagcgcaagcgccagcaagctattgcaaggatcaaaaatagtaaggagtttgctaaacgcaaggctcgctttagtggcgattacgatgatgaggaagacgacgacttccttgcgctacagatccacgaagaaaagaaccggccgcaaccgggtcagcttgcaaactgtgaaatctgcgacaagcgtttcaccgtgactccctatagcaaggccggtccgaacggaggcctgctttgcgttgattgctctaagaagcaaaaggccgacgagaaaaaacccccggcaaagaagcgtgcccctggtattggacggcgtcagaatcaagctaatctacttgatgggttgacacctcatggaactcagagtctactggaaacctgcatcaaggtatgtacacagcattcaaattccagggaattgagcaaggagtgctaattgttccatagaaagtggcagattatatccatgatattgaggacttcggtgatttgcctccgtccttgctgttacggctcggtcagatcttgtctagaaggcgggccgtgacctcacgaaccttagatctattcttacgaccccagtacacatccatcgatttgttcgattgtgctagtaagtcagagttatttcctcttgtttgaacaaagaaagtctaaccagtggctagaactcggcacggatgattaccacaagatcctggcttccatgcctcgtctaacaagggtcaatcttcggtttaccacaccaatgaaggacccgatttttcactatatgatggagcgtaatatggagatcaaagatctccacctagatgggccaaaccttgtgaccgatgcctgttggcgccaacttttcatgaaacttggtcatcgtttcataagcctcaaactatggaacctggatgatgcatttgataacgaaaccgctcgagtgatgtgtcttcattgcccaaaccttcaaagactgaaattgaagttcttacacaaaatcgacaatgagatgcttgaggaaatttcgacgctcaagtcccttcatcatttgtcgctgcgctttctggctgagaccgacgttaagaccgagcctctcctaaaagtcatcagtagcattggacgtcagctggaaaccctatctctggaggaattcaacctcgtcgatgatcgactcctacagcatatccatgaacattgccgtcatatgaccaagcttcgtcttgctctcaactcgaccttcaccgataaaggtttagccgcgttattcacagactggtctaatccggcccttacctatgtggacttgaactccctccgagacgtggacatgacgaacccggccggcccggaagagcctattgggcttgcttccgacggcttcgtcgcgctcatggaacattcagggttgaagatccaacacttgaacatcgcctcgtgccgtcatatctcatacaaagcgttagagcaggtttttgcggaaggcaaaatgtatcccaacctcaaatatcttgatatttcctttagcactgccgtggacgactaccttgcacagtgtatcttccggtgctgtcccgcccttcagagactggttgtttttgcttgcttcaagattcgcgacgtccacatccccaggggacttgctctgatcggtaccgtgggagcgactatcaaaatcgacggaatcacccagagcgagacaatttgagcggcgctacggtggttcgacaatactatttttcctttttctctcatgtagtttggcgatattgcgatctgaatcaaaagtctttgaaaattttcaggcaaacttggttttctccctagaatcttgacaacttataaaataatctgattaatttatctcggaataatattagggacgttatatccaagatagcactgcaatagcttctacatgtctttttttcgtccctgaagctgtagccaagaagaatacgtgcggtgagaaacaactctttcatgtgtaatatatgatatgatgtatttatcaatgctcccgaggttgggacttgctaaatcattcatataaaggacatcattcgtttactatcatgtacatatacgccaaacaccatgatgtatgtaatcataacccatatatctcaagaaaatgcaaaccaattgacagaacccatgctctttatcccattctcttgccaatctcactctgccagtttcgagacctctcaaatccattggaggcggtctggtagtcgagcatcgcctggtaaacctcatcctgagtgttcagtacaaaaggtccatactgaacaaccttctggtccagtggctgaccagccacaaggaaaatgcgggcatccttctcggcgttatccgggacagagagttcaacaaagtcaccagtctgctcgaattgaacgtttgtgaattccttcacgatgcgagtggaatcattcgagccaaagacagtctcaccagccaaggtgtaagcaaatgagttccatccctgtggtaggggctgcgatatacgaccaccgggcttgatcgtgatatccaagatccagacaggggtgtaggccaagtcacgcacggagtcaacaccgtgcgactggcccgagatgaccttgatcttgacgcggccctcatcgactgtcgcgaggggaatctcctcagcgcgaagatcacggtaacgaggctcacagaatttcagcttctggggcagatcgacccacaactgcataccgacatttgggctaccgtcttcgttctcgtggggcatctcagcatgcatgataccgcggcctgcggtcatgaattgcagatcgccgggtccgatagttcccttgttaccggcaaagtcttcatggtcaacgccgccggacaacaaataggtgatggtctcttgaccgcggtgagggtggtctgggaagccagcgcccttaccgatcgtgaagtggtcaagcatgaggaagggactgaagttgcggagcttggcagttccgatagagcggcgcacacgggcacctgcgccttctgcttgctcgatggcaaggaatgcctgtcggatagcgcgagggacggacatgtctgtgatggggaagactgtgggcgtcggggtttccaggttcaggtggtggtttgtctgattgacaatgtttttggtctgaaggtgctctgacaggctaggagcttgttgctggataaatgagaccaaagagtccttgagagagtctttgatagaagggttataggcaaggaagattgctgtgatacaaattaaaagtggcagaagtagtttcatggatgagatgtggactatttatatgccaaagaagcgattgaaaagagaagaatgttctgctgggaaggaaaatgctgtcagcgttagtcaatctcataaatactctttgtagtatccatcctgggcatcgcaatgctttgcaagacatcagtcagcctggtccggccaatgagatggcgtggctttattaccaactttcccgtcagcagccgctaagcaaagagctagccagatgtggttagcgttggtacctgataaatgaggtactaatgctgagttcagcatttcaaatcaggtgaccttggaaattgggatctataagccatcagtaattctgtggatataagtatcgatatatgcgtgctagagacttccatacggagtgatttcatgagaaatattaaaatactcacttccttgcattctacaatatgtacatctgcttccaagtggtacaagcgttacgtcgggagcacatagattggtcgttatcagataaggccacgaagcagccgctctccaactgccaaacctgacatgcgaggaccgccttgtgggtaggcatttgattcattccagccttggaaaattgcttactcctgtctttatataattacactgatacccatatgcgattgatttacatgaaaaacccttaccattgccgaattgaagcttcttgcgacaagcgcctttcgcgaggaagcttcgggatacctgacttccacaacgcctagactccactgtcatccttggtccactgtgttctaatctgatctgttctaagagatgggtcactcagcaagcctggcgccgtggctggtattggcatgtgctgtgtctagcacgtgggcaaacaaaaaaccgttcaacattaatgacgatattctggcttatccccaggtaggttggatggatctgtcttgcacccatttaaagcaaacctaacgttggatattgcccatagtatcaagtgacattccccgaggagtatgtgcttgaatcccacgccgaagcattgctccgatccgaggccagccccggcgccaatgaccagaacaatccccaggtttacataggaaaggatagaacggactccaccgcccaacctgaggatacgaatgtatctctgttcacctacgaagagatgatactagagaaccggcgactcctctgccagatcccacgtgtcacgaacgacgaccataatacaacgagagacaaggaggatagcaaagccgaggagcaaaaggaactagctcgggcgacagatcgtggcctggaactcctacgtgaaatggaggggaaatgcatgtactatttctccggctggtggtcctattccttctgttatcagaagcagatcaagcagttccatgcgctccccgctggccgtggtatccccaactacccaccaatcgaagacactcagacgcattccttcgtcttgggaaagtttattggcgacaagggcgagggagagaaacaatccgcccagacagatgtggcagagcttcacacgcagggcggctcacggtacttggtccagcatctgcgtggcgggaccaagtgcgatcttacgggacgcgagcgcaaagttgaagtgcagtttcattgccacccacaatcgacagatcacatcggctggattaaggagctcaccacgtgctcttacctaatggtaatctatacccctcgtctatgtgatgacgtcgctttcctgccaccacggcaggatgaggtacacactatcgagtgtcgtgaaatcctgatgcctgacgaagtcaccgaatgggaagcaatcacagagtggtacatgaccaaccaagtagccgatgctgctgcggatgcggatgcggatgccgaccaagccagcctcccgattgtcggaggaatcgaagttggcggtcgtaagcttgttggcatggagggcaaggtaattgaaaagggacgggtggtatccgcaagcgaggagcgagtggaggtggtggtggttgcgaaacgcgagaatggcgaggtccgaaaaacgtccaagcaggtactgaaaaagtacgatatcgacccggagaaactggaagagatgaagaatctactggaagaaagagcagaaggcaaagactggacgctggaagttgttgaaagcaacggcgtgatcaagttccaaggcagctttgaagacgacgaggaagacactttgaacgacaagccttctccagagaaactggatgaaaacaaggtatctgaaagttcctctggccaaaagccaaagcaggaaacagagtcggtcgaaaagaagaagcagtcctcaaccaagcctgaaaacagcgagggtagcgaagagacctttaaagatgaactatgacatttatagtagatcttgtacattttgatgtcttattttttacaatcctcatatgaatgatattgtgtttattttctgcgattagctgaactaggaacattactagcctacctcggtttactataaatactcattctggacttcatgcgaaggtgcaaattttgtctaagagctaattcgtatcttacgtgatatatattacatgcaatccatttacttcagaggtactatccgagtgttttatgcttccaggtgtcgtgtataggtacatttatacatttaatagatgtttatacgcgtcctaattctcaagatttctactgtaggaagcgttctaatgttagatacaggcaatttgattacaacccacatacctccaaggctagtgtattaaccctatattaatcaaatatacagccgcagacgtacgtcagtagccttgcggagccgaggggcgctttggataaacaagtagtccggagtatcaaagaagtacaagacagataacagcaagaaaagaaaagaagaagaggaaagaaaagaaaaggcaaaagaattccactgaagagaatgaaaaaaccacatagttcactatagctcgaggcaacgtgactgtaacctccctatcgcctatggcccaccttcccgccctctccctctctcctaatccaacctcaccctcttctttcctttccccctctctcaatcccttgcgcctaacctttttctctacctccgcgcgccccgacatctgacccgtacccgcactaaggagcgccaaggctgaccgagcaacggacagcgtcactaattctaccggttcttcccctacatcactgcgaaacctagagctggcacgttgagacgctgccatttgcagcggactgccttcataattgatcgccgtaggaccacgagttgtttccaatatgggtttcatcggtgtatactcggctgtgtacgactaccagccacagggagcgggcgaactcgagattcacgagggcgacctcctctacattttggaaaagaatgcggatgatgcctggtggagggctaaaaagaaggctagtcgggaggatgaggacgaacctgaaggcctagttcccaacaactatgtcgaagaggtgagtctccgccgatggcacccgcgcaggcctcgctgcatggacaattgctgatattatatgaaacaggtgcaaccagcgcacagagctacagccctcttcgactatacgcgacagaccgacgaggagatttccttctcagaagatgctgagctgatggtgtatgacacctcggatccagactggacgttggttggagccaactcggagtatgggtttgcgccgtcgaattacatcgaaatcatcgaggatacctccgctgaaactactccccctcctcaaccttctgttcgagccgagcctgccgcgccgacgcttccgcagcggccgacgcagactgcatcggaagaaaccgaggcatcccccgccgcctctccggttgatatgtctcacaaccccgctgctgctgcgatcgccagcatcatccataagcagcatgcccctgcgagggtatctgccgagacgaccagagatgaacccccgccacccagtcttcccgtccgaccatcgtacgatcaagaagaggaccacgaggagtctccgccgcctagtctgccacgtcgaccaccttcggaacatgcgtcccccactatgaaccgttactcgcctgacccaactccgccacgtccccagcaggcggcgcctgccatgggtcgtgatcggacacatgtcaaagcatcacccccttacaaccgggcaggtgagatgacgcctcggtccccttccggctatcatatctacaatatcaatgagatggttgaagtgatgggcaagagaaagaagatgccgacgacattgggaatcaacatggctactggaatcatctttatctctcctgaaggcgatgatcggcagaaagaatggagtgcagagaagctcactcattactcgatcgaaggcaagcatgtctttgttgaccttgtcagacctagcaaaagtatcgatttccatgcaggtgccaaagacactgcccacgagattgcagcggcactcggcgagatcgccggtgcctaccgggcagaaggactgcgtgaggtgatcgaggcaggagaagggggcggtcccaagaagggccagatcctgtatgactttatggcgcaaggtgatgatgaagttacagtagctgtgggggacgaggtcatcatccttgatgatactaagtctgaagagtggtggatggtgcggcgattgaagaacaacaaggagggtgttgtccctagtagctatgttgaagtcataggattgataccgaaggcgcctttgatgcctcatgaaccaggtttgtcgagtgtggaaaagaaccggatggaggagatgcggctgtccaaacttgcgatcggcaagtcacggacggactccatggattcatcggaccgtcacagcaagcgcgacagcaaaatcaagtcgaagcccgatatgactaaggtgcgaaggtggacggatcggaccaaggatttcacagtggaagcccagttcataggcctccaggatggtaaaatccagcttcacaaggtgaacggtatcaagattgccgtccctgtctcaaagatgtcagttgaagatctcgagcatgtggagaaagttgccggcgtctcgctagatgaggacaaacctctttcaagcatccgacctcgcgttaccattggcaatgattccaaagctggggcttctgtgcaacgttccgattacgattggtttgacttcttccttaaggctggcgttgggccacatcgctgtgagcgatacgcacagtcatttaacaaggacgcgatggacgaatctgtgctgccggacattacatctgaaatccttcagactctgggtctaaaccagggtgataccttgcgagtaatgaaggttttggatgccaaatatggccgtgccccggacaagaccaagcttcgaaatgtcagtttcggtggtgaggaagtcattggcaatggcgaggacggagggcaaggtggtctgttttccgggcccggtggtgtgctgcgcaacaacactcgcagggccagaccaacaccaaacgttccagccggagaggtcgatcccaaggcgttcgggcagggagaggaacctaaatcatcagacagctcggcaagcccaccacctgcagcagctgaaaagcctgcagccggatttgaagatgatgcttgggaggtgaagcagccgaagcaacctgctgggccacctgcagccaccccgacgccaccgcctgcggcagctcaggttcctcagccaacaggggcaatggcggatctgactttgcttcaagctcctttgcagccgacgccggctcagcctactgcaccagctgccccgcctatacccaccctgcagccgcaggccactgccgtgcaatcaccagctatacaggctcaacaaacaggtgccactcctagcttgtttgcgcaagtggcacagataggacagtatcaacgatctttcagccctcaacagaccgggttccaagcacaggccagacaacgcccacaggcccctccgacagttgggcataattcacttctgcctccgcccccgcaacgcccactgtccgcgcctcagaacttctcgcaactgcaaaactcctttggccctcctccattgcaagctcaactgacgggccttccccaggcgggtcctccggttgctcctcctggccagagtctgaccgaaataaaccagctacgttaccaagccgcgatgcagccgcaagcgacaggatttatgggtcaacctcaatatcagaatggcttgatgccgcagcccaccgggtttactccccagtcacaattcggtatccagcaacagcaacagcaactgccgtttggtagccagatggcccctcaacaaactggattccagggacttgggccacagcccacaggctttggtggatatgggcaattccaacaaccaatgcagactggtatcaactctgtccttccccctgcactgcaaccgcaacccactggtgtcaatggctacggcaaccagtcctacacatctccgcctcctgtgccgccaattccccagcaaccaacagcgacccccctgtcaccacagaagaccggaccggctccccccatcagatttggtgtcaagccagatggtcccaagaagcttgagccacaaccgactggactcagagccaacctttcgcaagctagtaagtttttcttaccattaaaggtggtaaacttgaacagaaactaactcaatttacagcccccaataatccgttcggcttctaaactgcttctgtgcttgcccatactagactggcgtatataattctggtttcctggcaatttcccctatattgcctcaagttttgctcatactgaggctaggatgttcttttcacatatcgcagtgtcctttcgaaccagtgcccttggaatcaacacgtgtacatatcatgaccctggtccccgttttgacgcagcgcgtatcgaagctcatgccacgaatcctcttcgtccttttcccttgcaaaacccccgcacttagcgagctatccatattcctttcctgtgctctgacaggtctgattaggcctctcatatcctgcatttttctttgtctctagcttattgtcatataaatctgcctatggtgatgcttattgtatggatgccctctctttctcccttttctttgtctggatggttacccttttcgctctcgttctctccctttctaccggctcatacataatccatggagtcgttggcatttgcttagtctacgtactccatgagtaaactttctatgcaccgctacccagatcaaactggtacctgtaatatgaacatatatcatcacgcaaaatacatagtgcagttcctttcatgtctcagcttcagaaacgtatagtgttgacatccaatttagttcggtgcactctaacctgaccaatgccacataaattctgttatgtacagattcatgcagaaataaatcgattcgcccttgggggtatatatatcaacacgtccgaccatacaaaaaagttataagagagcatcataatccccgaaacaatagggagatctgtactagtacacccgcttttcatcgcatcctctaattcgttttccgacatgcactgggtaatcatggctcatctccccagatgccaaagactggaagatcctcagccatatacagcagaccgttatccgggaacatcacgtcagaaagtggagatgggccagacgctgggatcgggccggaaggaatagtcccgccaggagagcagccgaccgggatgcccgaggtagttaacgcagaaatggctgcatcataagacaaagctgcggtggggtctgcgccattgcacagggcttcccaaacatcgttgtcggttgagagttggggttgagggagtggttgggagggtatgtaggaggatggacttccaacgggcattttgtcaggagatttaggggataatgcagttgcagatgcagatgagtgagcagcacttggctcagtgaaaggtggggctcctggggtcggggagttgcgatcctcgtcaccgcctacttggccgaagagctggtcgacctgtttgctgcgcctattcatccattgtcgatttcggcgggaaacgtattcggttacagcagcgcggaggtatttgataatttggaagaaacggcatgcatgtggatcgtgcggaacaaatagccctagaaaccgttcggctttgttcattccttcttccaaggggagaagattatcgtagtcggcgaagaatgcagcgccgagaacgatgacagagttaaaaacggagttgatcaagaagggtagtcgacgtggaagggatgcgtaatggcagagatcatcgaccacgtctagacctcggagtgcggaatagacacatgcatcggcaaacaatgatattcgagagctaccgtttcgagtttcgggggccaaatcgagtttgcccttgacatactgggcaacacgatatattaggaatggccgtgtcaacaggataatcgaccagtaataggacccgaatacatgagctgcggctaagctgttttccatggatttgtgttcgagccgctcagtctgcattttgaggattgctggcagagtgcgaacccaagcccgatgctggttcgatatcatctctgcaacattgatcgagatgacttgcttcatgtatacatcggtcaagatccgttcgaatattcgacaaagcgagatcaccgcagctgaaagctgttggtctacagtcaaatggtgctgtgattcgcctgatataagagcatcttcccgtatgtcatagtcgtaatctgaagttgcgggagggcgtcccagggaggcgctgagaaatagatccatcatacgaagactcttccaaacgcgctcccttgctcggcgctcacgcccacaaaagagcgcatttgcatccttgcggtggattcctaccgcgtatgcagcacgcagagcaattcccagattcatgaatgcaccattgcgcctgcatgcgccgagcatatacatggaaaccaaaacgtatgattgaatggtggatatgcttggggtttcctgaaaggccgagaacgccaactgacggccgctgccaaaatattgctcagctactgtctgatcaatatcggaaacctgagctccaatggcaaggacaagatagaaaatcgagctaacggtatcttcgtcacccgatgggtttgcaacccaattagctagccgtggatgaaattcctccagatcaaataagtcaagcaacgggcttgtagcaagcacaaactgacgagctagtcgttgggcttcgtgattgcttggtggcgcaactagagctccggactgagtgcttgggttgccctgaaaggcctcgagcattgagtgtcgcgagttgtcctcggtaaactcacatcggccaatggaagacgtaacaacacggcgcagactctgtaagaacgacaaactcgccgaatcaccaatatacataaactttccctgcccatcgcgcagaagtcgcgccacctttggcacgggagccgtcccttccttctcatctttttcctggcgttccatattcattccttggttctcgagagagttcaaaaggcggtccattgccgtttccctctgcggagatgctaccatgcgctcactgagcaacattgtcgaatccttggcgtccggcttgagtaggcgggcaggccggtccgagaaatggcattccgactccttgtgcctttgaacacagattgtacatggttgttccccgttgcatttttgctttcgccttttacagctgtcgcaggctcgtcggcatcggaggcgtgctcccggggtagtgctggcccgaggcatccctatcgccgcgctcgcgtttggtgaataggtcgggtcactcgtccaggatttcagtggtaatcatcgaggcgtgagatatatatgaaccgattaagtcgggaacgatctatattgattcaagtcattgttgaggcttaatgaagtgctaagcctgttaagtgcggccgtctgctttccccggactccaccatctgactaagcagattcatcccacctgggcaagatgccccaggtctgtacatacggagtagatgaacttggaatcaaaatctcacatgatgtattggtgcattgatatgacaatacatttacttcaagcttacttctccagaagatcacggccggaacgatactatcttgccccaggtgtcggcagtgccccaaatgccagtccgcaggcattctaactgcacaatctggctgtgatccacaaacaggttgacatcaataccaaactcacgaacgtaccaattaaaggccttgggatctgcagcttcaaacatgatatgctcaggaggaagctccttcatgatcttcgacaccacatcagtccgccaggaggtgacgttttcagtgataccttctgactcaatcatcaaccgcttcacaccagcgttgaggaatctacgacccaagtttactaatttgccggggtcagaggtcccaatcgattcaagtcctgaggcaggtgtgtctccgccggctccgaattgaatccccaattcaggcttcggttccaacttgtatgagtggactttatcaataagtcggatccagtcatcctccgggaatgacagaaaaccggaagacaattcgatgacatcgaatctatgttgactagtcagattttatattccaggctcctgggcctcgagctgaggatgcacgtacccgagatccttgcattttttcagatagcggtcaaacaccgtatttggatcgggatgtgtgaggagatgctcagcccatccaccctaaaaccggtgtcaaatgcgccaatttgctggtctaagacagtcttaccgttgagacgtacacgccgtgctcatgggcaagatcgaccaattcccgcagtggcgtctcgtgaaaaagagtaaaagcacctgggttggtgtttatctcagcgctctcgtttctggcgacagccgaagccctgctgggactcacctccggcaaacttcagaccatctacgtgatcgcccatcctatcagctgttgtcagatgccatttggttacgtaggtggggacatttcgaaatattacgtttcgagaatatccgcgagatatcttttacccatgacctagtttaggttagctccacagaaaacgatgatagggctatatggtacccactgagtagtatgggcctcggatctccgtgactcccttcgttctaggcttggcaggtctagggtttgaccgcacgaagccaaagccattttgcttgtcttgcagaagagtgatgccttgatatattttcggggtgacagaaaagtgtctagatggggtcgacagagcaattgaagtgcgactcattatacgcccggttacaagtggattaacaaacatatttaggcagttactggactagttgagctatccacatgagaaatcatgtatattgggagtgtcgacgtcaaatatacttcatcgaatcaatgccaatgagattacgtagtatattacatcattttcgaaataccattacaatctacaatcatattgtattccttcaacatacggcgcacaacatatgaagttctatacaaccccggctcggataccggagactctgtaacgcgaagtgtttcggcgttcggcaagagcagacccgatcttgtacattttatccatccatgatgccaccgttgtagaaggtctttctcggatgacacaggtaccgaggtatatgccttgaagtaccactttatgaataactttatatacatgaggtcgttgtatatctccttgtgcacatctctatgcacatctctactccgtacaaccctagctatatccaatcaatgtcagggaatccccaaactacagtctctgtatccagccacgctcctcgccaagaacaaaagccagccttgtggactcagctttcacacatcgattcgatatagagagttatacccaaggaatagccaaaaaaaatatgcaattgattccggtgactcccgccctggccctggcacctgccttggacattcgccgattttcgaacacaactagatggccctgaagccaactctcctcctctattacctacataattcaaatcccctcattcttaaagtacttctttataggctgctagggacccttcttcttcttctttcaagtcgagagaacgactggtcccttggtctgatacccatcatgggagctggaatggtcatcgagcctttggtggttattgttctcttatttggaggcacctggattaaccgctctgtcggatcatcctcgactaaaagctacaaccgacggaactcgaacgaccttggacgagccgcttcatttgattctttggagtcgggttactcaagccaatcgacaaaggatggtctgctgagccctcgctcccactcaccacaagccccggaagacggatggcacaagcgacaagttggacttttagggttgaatttcgaggtatcctcgccgaatacgattgtattccaagacagtttgctcagtcgattgcttcggaagtttcctttcttggtggaatgttggtattgggctttggtttactgggtaggttgatttgctccttaacttaccatcggtcttggctaaaccaaactcacaatttgtatagacgtaccagctcggtcgtgcctttaccgccgtgactctcaaggatgacaccgttgatgtcgcgaggaggcatgcattgcaactaatcgtgatcgaggagaatctgggaatattctgggagaccttgatacagagacgcttccttcgccatcctcttgtcatgccttggatcaattggatgtactcgttcatacacattcctgggacaatcgcgtttctcgtttggctctattactatactaccgtgcggaatcggatcgacgaggctcagcccggaaagcccaagggagctatgagcgggtcgcctgcaggtcctcttctataccaggcgcgtcggcggactttggccgtgtgcaatctcctcgcattcgtggtgttcactctttggccttgcatgccacctcggttactgagtgatacagccgtggatggtgacgagggagatctagcccgcagttatgggttcgtggacacggtgcatggtatcaagggatcgggcagtgtgtggaccgaaaaccgcttctgtaaccaatatggcaagtgttgtctggaatcctctctatgaatccttggctaactgttaccagcggcgatgccttccttgcatttcggctactctttattgatcggcctcacactgatcacaatccctttgccgcagcaccaccggcacacaatcctgcgtactcggctgacccgtgccttaagactggagctcccgtcgtggcgccgcctcgtttgcgtcatactcggcttcctatatccgtttaccatccttgtagctattgttgccactgccaaccattttattctggatgctgtcgcaggagcgcttgtatgtgccttggggtggtattttaatggggtgctgctcaacctgttgccactggaagactacttcctttgccttgtccggatccataagcctgagccgtcacttctcgatgtccacgaggaggagtgtcccacgaccgaaagtgtttgagaacatggcatccgagtacacccatagttgattcgactttggattcagcgtctttgttttagaacttgataccctgtatgaaaccccaccagaccgcctggtctggtttataatctgtctacatgaacctcccttagttattgttacccagttctctctgtgggattgatgtctctcccgtacctaactttcgccaattagtatgtttatgcaagaaatattctttgcttcctagaagagaaatatgactattatctaaatagttcctttgtagacagtagagcataattatcaccgtacatacaaagacaatccgaatattacaaaaacttcatataatatctctctcaaatccaaaatagaaatacccctggaaaaaacatcagaccaggaaaggaggaatcgcatcatcttggtggggtttacttccatagaactttagatgcgtttaaatcaactcatttgattccatttgtccctcgtattcgctcacctcgttcaaatcagcagcccatccaatacttattatagtgtgctggatcacatattacacggttgtcacggtcgacacaatgacatgaggaggtacggagtcgcaagctccctggatgacccttgagttctgatctgctcgtgattacacacctctcgagagcattgaatacacacttgatacggtggcctacctcgatgtgtattgcgactctaccgctttagcgatttgcgattgcttgcaaacaataattgagcatagcaccgaggctgtcatagtgttgtggctataacaaaaggaacacgtcacattcccttacattgcggccaggttggtttgaatcaatgaatttgcagttaatttgaaaagaatctaacctgaagaacagattcatccacgtgcctatgccccgaatatcgcggtgatagctcgaagtatacatgtctcttggcacttgacagtatgtggtattatatgccagtgaatgaatgcgagaccagaagataacgaagacaaaagagcaaattgactctcgtatgtcaccaatcgttgctattgcgccgtgttgtccagatatcggtgattgtgaaggcatacagcaaagacgtccatcgactctttcggctactgtgtgctacaatttatcgatcttccagcgagacatcagaagaggagaccagaaagaataacggtcgttcctttggtttatgtcgaaaacttggaatatcagtctgcccacgatccgtgatatgcaatcccaccaagcgtcattacttccccttgatacctattaggagctgacatcgatactccattggcatcttggatgcatattcccatcgtgaagtgcttgtctattgaaaaccttcagagaggtaactatctagagacatttctacggagtacccctatgcgcgctgtgcaatgctcttccattgaccatccaaataccttgaaacatttgaaatccaaaaagcgaatcaatcaatcaccctcatcttctaatttaccgtctaagccttgttgtgtggtgacttgaaacttgtggcgtcattgcggtcttccgttctcagacgcgtcttgaagttcccgcgcctttcgcgactctctttcttctccacatctctcctaccctccctcccctggaagctcctcccaccacctatcccagtgccaatctacccaatcgccctgtgaattttcactcatctcattccagcttgccattatggctgacgatacccctgtctctgcgccccaaggcgagcagcccgagcgcgccactgagcaacccactgactctgagaacaagtctgaggatgtcaccttgtcggaagacaagcctgccggtaagcatagactgattgatatcaagttatcgttttgcgactccatttttcaacgctgtcccccggtcgggacatcctgtttctgtgcgacgccactaacccgctgtttcttccagagactgaagctgcgcccgacaagaagacggacgctgaagctgagcctgataagcctgcttcctctgatgaggctcctgaggccaaggccgatggcgaagccgccgaggctgcacctgccgatgtggaggccattgcgcccgcggaggccaacggaacccctgcctcagcgaagaaatcctccaagaatcgccggacctccactggtaccacccagaagctgagccgcaagaagtctcagagtcgcatcacccacctggacgctaagccaggccaaacctatcttgcccgccttcgcagttatgcgccctggcccgctatcatctgtgacgagggtattctgccatccagccttctcgaaactcgtcccgttactgccatgcaaaaggatggatcctacaagggcgagtatggtgacaatggcagacgcgcccatgagcgtaccttccccgtcatgttctttgataccaatgaattgtgagtcgaccatccgcgcagcctctacgccagacgcgaacttctactgacttattttttttgtacagcgcctgggttcccaacactaacctgactcctctcgaccctaccgagtgcaaaaatatttccgagaagaataaaaccaaatcactcatcaatgcctacaaggttgcatccgagggccacaaccttcagtatttcaagaagctgctgaacgaccaccaggcagctattgaccaggaagaggctgagttggaagctcaagaagcggagaaagaggctgccaaggccgcaaaggaggccaagaagggcaagcgtaagagcaagggcgctgagaccgatgttgaaatggaggacgcggatgactccaagaaatccaaggctccttccaagaagcgcaagaaggatgctgagaccgatgctgaggcggaaaaggtatgtgttacaatttcattgtgttgtgatctctcatctcacgaaattatagcctgctaagactcccaagtctaacacaaagctgaagttgaccacccccaaggctcctactgaggatactggcaagaagactcccgccagcaagaccaagaaagcacctgccaagaaggccaaggcagctcccgttgccagcgatgaaggagacagtgccgatgctaaggaatctgagaagccgattgacccagaggaactgagaaagaagaaggaaaaagagagtgagagatcccccatcttccccgacgagtctgatcaggccagcttataccttacagttttgttcctccgccacaaactccaaaaggggttcatttcccgcgaccaaccccccaaggaagatgaaatggctagcatggccggctactttgacaaattggaaaagcattcagacttggaggtctcgatcatccgttcgactaagattaacaaggtcctcaagatgattgtcaagctcaactcgattccccgggatgaggagttcaacttccgtcaccgtgccatgggcatcttgtctagctggaagaacatcttggacgcagacacccccggcccggcggacaaggatgagaagtcggccgttaacggagccaaggaggatggtgttgaaacccctaaattggagacagaagaggaaaaggagctcgagtctaagtcgaccaaggacgttgattccccaatgcctgacgcggatgagaaagcccctgagcccgagaaggaagaaaagcccgaggagaaggcagctgaggagcccaccgaggagaagtctgaggaaaagcccgcggaggctgctgcttgagtggtaggatcacgactctgcgatatctattttcttactcctatccatttgcgctctcattcaagttctcttctttgtttctgtttcaatctacgcggttccgccggttttgttttctttttcatcttttttgtcacctgccaatgcaatactgggatacggggctggaccaaccagcaaggcttctttgaatcaattgaaaatgtgattattgttttttttttaatcggcttctgcacattgacctgtgttctggccatggagtacaggagttacccggcctggatcttcccagaggttgcacgccaatgatcgcttcgatgtcgggctggttatgcaccaaatcgggcccagagtatcggagcgaatgctgttttatgtgcaaatgcacagaaagttccccaagggtacgtaatggagagactatgtcttattcactgcatgtattgagctcttgaatacaaggatccataatggcgttcagtaaatcagtaaatagtagaatgtatgttggtaagcctctttcgaaggtcaaagggcgtgtgcaattgggattattatgtctatagaatctctatttgaatggagtcaaggtatcgacgtatatgcccggctctctgcaaaatcaaaaatccccgcgccttctatatatgtatgcagttatacatcacgctgcttgaaaacaaatagaaaaacaaaatgccggttcgatggaatctccagatttcctgtcgaaatcactcatgcatcgacagcgatgacaaccacgacgcagatatcatcaactttcccgccgcggtaatagtcaccggggtagtagcgctgagcctccttagcaaagggcccatcacgacgatagtcgatactagcaatcttcgcctcgccagcaatcgtcgccgcgagaacagactgcaaggtgactccatcctcaggtccggactcggtgtgagccgggttcttggaaagcggcgagcctggcggagtcggaagagcaccagccaatccacccggcgcagcgagtgcacgcagattctccgagactccgacgccagactccgtagccgtccacgcgcccgtcagaaccatacggctcgtgacgagcttgagaatgtcctgattattgatattatcaaaaacaccatcggtagcaataatgagtacatccccattctgcatctgcacattcgtaacggacgcatcactagggaaatcctccaaaaacgccccgccaaagacagacgcctgggcgcgcatacgcggcgggatcacactaagctggtacggggtgttgaaaccatgcgtctgcggaatcgagtaatgatgcaccgcggccctcctcaacaacaccgagccagaatcacccaaattggccaactcgacccgtccatccggcaaggcgacgccaatagaggccgtactcccacctgcccggatcgtcgaatccgccaccacctggtcgtacccggcctgcaggaggtatttagagcgcaagcgctcggcgggctcgtgccaggtctgtgcggtgtgcgccatgtagttgcacaagccgtgggagaagtcggctgggtcgacgcgagattccgtccagccacctacgccatctgcgacgccgaaggcgactgcttcggcgtttgtttcttggtagtctgagatgcgatttccgatacggcttacgaagaaagcgtcttcgccggagtctgggcggttgcgacggcgactgacggagtttttgtcacttgaaacgcctatggcgtctgcggcagggtcgaaattgtatgcatttttgatggggtggaagcggcggcctttgccggaggaggagacggcgacgcggtaggaaagtttcgagggagagggtttctctaggtgggttgctagcgttgtgtggaaggctcgacgcgagggttgatgggttagattcaggctgaggtgagcatctggtctgactcctgcggcgtgagacgagaagcggacatgttgggttttgaacagcgaggaattgtatgcgttcggattggtggagattgaatatacgccatcgcggacgatggcttggaggctgctgcaggcggaactgcaggctcgacacgagacacttggcggaatcatcgccgatcgggggcttatatacagttccctcgtgaaggatagggctccaatttgggagcgagcgtataagacagaatccaaaaaactaaaaaaatcaaggagctgcatgaatctcaatggataagacagtacccgcccttatcgtctgaccgcctcgcgtcattagtttttcgttgatacctgattactcaggcagaaattgtctttgtttgggatcggacttgggattggaagaaacaagagaatctgttcaatgttattctcatatttagttgaatttaaatatttctacttccacgcgacgttcgtcaaattgcatgctcttcaacgctataccgccaaccaaagtttatcaatgattctgccgcccgcaacatcttgtctcccgccaaccttttcctctaccccaattcttttcttttactcaagcgcgagtctttattaatctgctttttgagccaccggagaagcataggcttctaagtcgcccaagatgatgcacccatcgcgacaagcttatgttgaggagacagaggatacagacatggggggcatcagctatgccgatcttcgtgagtagttctcgaaagcttcgatttgaagcttcctaataaaataatagccatggaccaagattacgatatgccctctacaccagggggtatcccaactgagcgcgcctccgccatcctatcgcaattcgaacggaaacgcagagcagcagcgatggtggtcccaacagatgacacacgagtgcgtgcgcgactacgggaactcggggagcccattaccttatttggcgagggaccatcagaacgacgcgatcgtctacgtgaatttttgaccgatatggcagagaaacaaggcggaggcgagatagaaatggaagaggccgaggaggaaggagaacaacaagaagaatttttcacagatggcgggcaagatttactcgaggcgcggaagaatattgcgctctattctttgccgcgcgcaaaggctcgagtggctcggctcaaggacgaatcaacaatcacacttcgaacacatgtcaagcatcgcaaagctgtcaaggaaaagctacaaggattcgatctttacgggtcgcagattgctggcgatcgtcctgttagcatttgtcgattcgcgccggatgggcagaccatcgctgctggaaactggagcggtgagatcaaattgctcagcgtgcccaatctggaagaaaaagcgaccttcaaggcgcatacggatcgagtgggcggcttgtcgtggcttcccggtgccactctacccggatcgaatgtctcaccttcaactgtcaatttgatctccggaggcggcgaaggaaatctccacctctgggctcttgatcaagaaaagccactggctacgttatctggccattcggcccgtgtatgccgtaccgagttccacccttcgggccgatacgcagcatcggcatccttcgacagttcatggcggctgtgggatatagaaacagcaactgagctgctcctgcaagaaggccattcgcgcgaggtatatacagtggctttcaacagtgatggctcccttgtggctagtggtggattcgacagcattgggcgtatctgggatctgcggacagggcgcaacgtgatgatcctcgacggtcacattcgggagatctacggtatggactggggagttgatggttaccgggtgctgtctggttccggtgacggcttggtcaaatgctgggacttgcgacagatgaaggagacgggcggtattggtgcgcataagagcgtggtgtcagatctccgctggtacaagggtgcagaggctgcgtcattcttgccttctaccgatggcgggatggacattgatggcgctgcaccggctgcagcggaagccccgtcgcccaagaaatccggcacattctttgtgagcagtggatttgataaaagtgtcaacatttttagtgcggatgactggtccctagtaaagtcgctgagcggccactcgggcaatgttcttagcacggatatcagtgacgatgcaaagtggattgctagcagcggccacgatcgaacggtgaagctttgggggattgaatgattcggggttatagcttgactattcccctgtctgatgcatcataattggaaatcgtacacaactcaaggaacaggctgtatgttacctattgaagaagacctatcattatctacatcgctttcctgtgtaattcgtagtcacgtgccaaatgcggggatgacgtaaagcggtatgccgagagctttttatcaactttgaagttatagcacttccgttgaccttcccttgactgtaaaaacactatatagtcatggctttccgtccacagaggattgcacggcatttctgtcgcacaaaaaccccacggcctttatcacgaccaacctcgttatcaaacacaagtcaagatgcatgcctcttctgccgatatcgccagccagcgcgaggactaacaaccctcccaacacgtggacctctcatagcccggacatccaagatacagcaccgctctgcctcaacagagactcccaccccagcagaaccaagcaaaaacacccttgccggcgcgccagacataaccaaccactacacgatcttccctcaaacgctaccagcaggcccgccaccagcctcggcgttcgcaattccaaccagcgaactccgccgcgaattcctccaactacaaggcctcgttcacccggacaagtaccccaacggagcggagaagcagcttgccgagggcctctcggcacggatcaatgaagcataccggacactcctggacccgctgcagcgggcacagtacattctacgggaatggcacgggatcgacgtgacggcggaagatgcgtcgactaagcatgcgcttgatgcggagacgctgatggaggttatggaggtgcaggagactattgaggaggtcggagggtctgctgatgcggaggcgcagatcaatacacttaagaaggagaatgaggcgagggttcttgagtgtgtggggagacttggggaggcgtttgagaaaggggatttggaggctgcgaggaaggagtgtattcgattgcggttttggtatagtgttggggaagggttgagggagtgggaaccggggaacacggagattcggttgatgcatactagttgatcggtggtttattttgtaaattattggatttgttttgatatatttggatagactacgctactctttttacatgtgacgtttttgacgtttggagaattgaatgtacaacaggcgttgttcgttgtatactcccaagggtgccaactatatttgtggattcacgatgggatggtgaaatacgcttgttcctggaatagagggggcgagggatatatttaacctgtaacagcggagccagaggtttcaaaatgtctatttttatagacatctgtaaatattttgtgaatctcgtcgttttttccaacctcggcataagattaggtagcgtttcagggcaccgttgtacaaccgttgaccgctacatccaacatgtccagaatctcgaggacaaagaaaaattcaaaccaagtgaagcttcaaattcaaaacgatggagcttgcaggagcaaatcaaccagtgaggcccgagattgggttctccgaaggctggggattgggcacaaacctgctgatgccaatgtcgcccaacaattggacaatgcatgatccagttaacatcggctgttctgtatggctgctctgtgtggctgctctgcgttgttttttgtgtcggtgatagcggcatcgcattcaaatggttcaaacggacgggtgggtggtggccattggcatccggggggggggaccaaatcatagtatatcgagagaacagtgtagggcgaacacataccacggcaacatcaaacctcttttggccccatctgcatatcgcatatcgcgagttagtcatttggtctagcgttaactagcacaatgggtcttggaaagggttcatgcccccatcacagctgcacacgtagcaggccactctcctcgcccgagatcgcttccagcgccttgggaattggagcgtaaaatatttaatggggctatcccgcatgttagaacgtagttttcttcatctcatcccttctgaagcggaaggtcaactgtcatggagtctgttcctaacttcaataggtatggagagcgcatctcagctatgatataggtatagactgttagcagaccgctaattcaacatcttcagaatcatccattcagcgtcattcaccttcctcgtcggcccacaacatacaaagctgacgatccagtcggggctcgcccaccatgtctctaaaccactggatcatctcatgaacggcccgacgagggaatcgaaacaccgaatcgccgttctggaagaagacgatgttgaaaccttcgttgctttctgcgagtatgcatacactggcaattatagcgtgcctcgtcctgaggtccaggaagatcacagacttggagtagtcgagagctcgacaattaccaactggagagggaattatcggtctgattcaatgtcgtcgattgtgccacccccggctccatcgccacctccgcaatttcgccatcggagacaagaatcgtaccagcagtctgagccttcgcccgcctatgtaaaggaaccggttactccgacatttgcgcgagagcccgaggccgagtcggctccagatcccaagactccagttagtatagcggagccggagctagagacataccacgaagcggagactgcacccgagccaccggctgaagaagtgcctcctgccgacgatgagtgggcggttccgaccgaagaacctgtgtcatgggaatcagaggagcctaaggcaggcaaaaagaagggaaagaaagggaagaagggtaaaaaacaagcggagatcgtcgaagaagaacctcccgcaccgactgagcctgtcagccttacgccgccatcaacaccgccgccagaagttgctgctgagccagaggcagagccagaaacagagcccgctgaagaatggtctccagtaaaccctgtcccagaagcagaatcagaaccggctgagtactgggcacagccagctgaagagcctgcacctgagcctgcacctgaacctgagcctgaacctgcaaccgaagagcccgcgcctgtagaacagcccacacccgctgcggaaggaccgatggaagattcatggactcaagacagaagcccaggcaccagcgttaccaaagcacagccgcaaagaccaatgctcgacatgtcttttgcccaacagaaagcatcctcatccagcgagcctggtctcaacctatgggacgagttcatctctctgcagtacaacgacgagcccacagcctccaagcccaccccggtcgagtcgccaagcactgagctcccctacattaccttccacgcgaaattatacgtcttcgccacacggtacctaatccccgctctcgcccagctttgtctccgaaagctgcatcacgacttagtcctcctctcaccgacggaattcgaaaccccccacctagacgacacggagattctagacggcttggcagcaaccaaggcgcagatggtgctagagctggtgcaatacgcatacacgaagacggcccgactagagccgatctcaccgacatccgccacacagcttcgggagaatgagctgcgtcgactggtagtgcactatttggcgtgcaacgtgaaagaattgtcacggtatcattcggcagaggattcggtctcggcgacgcctaatttgcggccggtagatgccaagacggagcgggctgagacctccacttctacgtcccctaaaagtcttcgtgctttgttagatttgacgacagagctggcctccgatctggtctatcgcatgatgtgagtggatgccgagatgtgattgggtctgggatatgcccagacttttggtgttctattttctgcgttaacttgatatgattttatgcattgatgccctcgagatgtttcgaaggaccgcgctggcgttctgttgcacaatttgaatgtgtcattttctgttttcgaggtgcattgcattatcttgcatttgtcctgcatgacgttaatctttttcttcttttctttctttccctttgaatgaatttgcaatttagattgtgtccatggctgtggtatagtcgtagccttccgggtgatcggtggggtcccgtcgacttggtaggagagagtggactctatgaactccataaccgccagaccctgattgtatcaagtgaattcctgatgacatcgacatgggtttcatcgtataggtcactctcaaacaaggtggcatcttggcaaaacggccaaagataagccaaccaactcaccaatgacgatccaaacatccccccttgaaagaagatcgaccgatcgacaaagatccatgtccgaatagtctcttggcaggaatcccagcgtcaatagtgctgtttgatgggggctgtgaaggctgtgagggtcgagaagttcaggggaaaggaagcgccaagagattccgaggtacgtcaacctgccaactccacctgactttgtgtcaaattctcatctcaacttctctccttgattttcagattgcgtgtcttctattgaatttgttctacacgtgcatactcggtacacgcaatggtgtgacctattatttcctctcctccaatcctgtctctgtcttcataatcaaagcttggcagcggtccgtcaatgtactggagatcgctcttggcatttggcgtttaggcacgttggaggcgcattggaatatccctgtttaggcttttctatacatctgatgccctatcgggagggctcggcgtcaaaggcaatcaaagtcggcccgtaactcggctttgagattcatcatctgagtaacctgtctctgattcaaagtgagtgttgaactgacacaaatgcacagattgtcaatcagcctactctgtactctcccaacgactgggtctccattcagggaaaatcactacgcaatggtttctacatgttcttggcagagctggactttccacccccctaggcatcgaagttctatatgcctaatgctcagatccgcagtggatctctgtgctttcggaactgcccctagaggcacaaaccccctgacgcatatggagtatgaatcgtccgagcccaaaatcctggccgatctattcttatagatttctccatgaattatgggtccgaaatgctcgttgaggccgctggtaggtccattgcaaatgattcctttgccttgcctaccttgtatataatcccctttcggtttttgatctttttcactatcaaaatgtagagtcttggaattccttggctgatctttagtgattccgaaaaaatatgaaatcgatatgcttggatgttctgcccatggtatattaacatcaccctttcgcaccttctccatcacttccattcatcactcatttacttcaattcttccagacttgacttgaatttgcttttttattcattctatgatcaattggtctatagtcctatcttgaatacattccacctatactccttttttatgttcaaaccttagggctgcatctatacctcattgcatacaaacacacacacacacacaatgtccaacccagttctactaggggtctaccctaaccacagccaagagcttcagcctccatctgcaccgccgtctgcaccgccgtctgctcactccgaaacacccttcatggaatcagagaagtaccagaagcagtacccactgagcttccgcgatcgtctccgccatttcacatgggcatggtacaccctcaccatgagcgcaggaggcctcgcccttcttatagcgaaccagccgaacaagttcacaggctaccacgagatcggcctagccatctatctgatcaacctcgtcctcttctccctcgtctgctctctcatggcagcgcgattcataatccacggcggcgccctcaactccctccgccacgaacgcgagggcctcttcttcccaaccttctggctctccgccgcaacactgatcaccggcctggagaagtacttcggcgagaaccccgccccatccttcacagccacactcgaagtcctcttctggatatactgcttctgcacattcactctcgccgttgtacaatactccttcgtcttcacctcgcacacctaccgcctgcaaacaatgatgccctcgtggatcctccccgcgttcccaattatgctaagcgggacgatcgcgtctgtaatcgccaaaagccagcccgcgcgcgcagcaatcccaatcgtcactgccggaatgaccttccaaggtctaggcttctgcatctccttcatgatgtactcgcactacatcggccggctgatggagagcggacttccatgtcgggaacacagaccggcgatgttcatctgcgttggaccaccagcgttcaccgcgcttgctctcgtgggtatggcgcagggactgcctgcgacgttcaacgtgatgggcagtgaggacactactgccgacgggcggatgctggagattctggcgttggcggcaggcgcgttcttgtgggcgctgagcttttggttcttctgtgtcgctgctattgcggttattcgggcgccgccgacgagcttccatctcagctggtgggcgatggttttcccgaatactgggtttacgattgcgaccattacgcttggaaatgcgtttgacagctccgcgattaagggcgttggctctgcgatgactatctgcatcgtctgcatgttcctcttcgtctttgtcaaccatggtcttgcagtctatcgccaggatattatgtatcctggtaaagatgaggatacctcggattgagatgtccttccgacaggtattattgtctctcgtgctgtttttgatttctttcttgtcacttttggtattttctcggctttttgcacagtccttgttcgcgttggtcttctttcattgcacacactactgtcatctcattgcggtctttttcattttgattcccaattcttgttgattctccctcttactctttcgattcaaaaaagcgttcaagcattttgttttctttgtcttggttctatgagaactctgcatctccggcgtctcatgtcctgtctgatcttccatctccttagcgactactacatttcaatagaattagaacaagaacatttcatttcattgcaatcatttcatacctgcctagtaataataaaacaaaacaaaaaaaaagaccaatccgttgtgtacaagtacgcagtctaagaatcagaacaaagaaaacaagtcacgcgaccgtaagagccctacttggaagccttcattgcaaaacaaacacaacactgcagagcggaaaaaacaaatcgcaaagcgcaatcaggaaacaaaacattgaagaggctcgtcttggcttcaccccggagggttactggaccccagcaccacgttgaggtgcgagccgtcgctggggtaaatggcagaataaatggcaagatacatggcaagataaatggcagaggacatgggaaagcaaacatgatgacaaagtccctctcttcacttcccagccggcaccaggttgccccaggaccggtgggcagaaggcgggggataaatggtgaacaagaaaaccgaaagatgcaagatgaataaatggcagaagaagttgcaacggagtccctctcttcacttcccagccggcaccaggtttccccaggaccggtgagcagaagacgggggataaatggttaataaatggcaaggctcgtcttggcttcaccccgaagggttactggaccccagcaccacgttgaggtgcgagccgtcgctggggtaaatggcaggataaatggcaagataaatggcagagaacgttgtaagcagacatgatgacgaagtccctctcttcacttcccagtcggcaccaggtttccccaggaccggtgagcagaaggcgggggataaatgataaacaagaaacccgaaatgtgaaatgtgaaatgtgaaatgtaaacaaagcgaaggggctcaccgttgcttcacccccagcacccggtggtgcgcgagccgtcgatggaggaaggtgggagaggatgtgtaaacaaaggacggtgacaggaaaagggggaagaggaagaaaacaaacaagtgatgatgatggatggatgggtggaaatgggagatggaggacgatgaagatgaatatgaagaatgggaaatgagagatgagaaaaaaaggagggatggggagatgaagaagagaagagggagatgggggagacagtggtatttatgggagaaacagtcgatggcctcaggatacacctggtcgccctggcaataactatgtatgtcaccattatgtcaatatgtatagaagtagaagagaagacaatgatattgaatcctatgtaagagattgtcaccttgctcagcaagtttttttgtgtgggtatcatgatgacaggaaaaagcagtcttgtgccgcacatggcttcatcgctgtgaagcgacaggtcgagttcatgctcgacagtcaggccttgagacgtctaagcttcgtggagcacactggcgcgcactggaaaaacggccagaaacacgtgacgccgacggcatctgatggactaccacgcggccccatctgctgggaaggagtgaactgctgaggcgagacttccggattggtgaaggccctcagagtggtagacttgggatgaagtgcgaaagccgttcacagcagcttaagcaatctttctgccgacgttaccgatgccacggccgacgatgctgacaatcacatctccatctccattgtcaggtgcgtctcggataccccagccgggggcaccaaacttggacagatctcgagcgagctggaccacgttgggatcagcaatcacatctcggccaacctgcagccgcccgacatcctccgatcccatggtcatgagagtgaacatggtggtcgcagccgcaggagccacacaaccacccttggcaaccgtctccagaagctggaatgcacactgctttccaacttcctcgggggcttgaccacccgacggtggagaggccacatcagccgagaagaggcagcccgtggaagactctgccaccaaagacaaaccaaacccaaggccaatctttttctttgcctgggggttggtcttatccggagctggtactaaaggcgcagacgccacgtcggagaaaatataagtatcagggctgagtgggttgaggataccacgggcagtctcaatcatgcgagcgttgttcgagccagacacaccaaccgagtataccacaccgcggatgcgcttgatgcggcctgcgttcatcaagtgcagagtcttcggcagacggacctggtggccaaacacaagttgcacttcaccaccgccacccctgccagtggggccagtgtttgatcgcctcaggatacggagctcgatgttgttgaagataccaaattgtttgtacagagggaggatcgctgtgcgaacactgtcgacggacatatctccagtctgtgtcgacgatgtgatcacaccaggtcctgtgaagagcaccttcatgggtgctttggcgaatggggccagcagacatagagggatcaggaagtaactgagaccacggttacagtttgaaggaagctcgtaggtgatcatgccgccgctggctccagtaccggccgtgctgccggtgattagacccggcttatagacaagcacagtacctgtgtatgagatctccatttgagagccattggttattgcatctagaaggcggaggaaagaaatttcatgaggcgcaagaccagggttcgtgggcgacgaagaacgaatttgggagatgtgaactgtgcggccggtgagggtggacaaaaccaggcgatataccaaattatgatgggatgtgaaccgaagggggggttgagaggtggccattttgtgtggttggtcaagtctctcgccgttaatcactgcaggccgactgttggattcgagattggaaaaagaaaaattggcggagggaagttgatccgggccgattgtttaagtccggggtggagctgatatctccggggatcagatcatcgttttcgctttctgacggttccgacctcatgcgacatttgcgaaaagctaccaaagtagaacactgacaagatcatattttgatatattcacgatgcttccaccagcactaaacattcccaaatggcaagtccaagacttaacatatctttcttacaatgcttccgaggttcccccactatatgataccatgattcatcacgcgacccataagcaagctatctaaacaaaagccaactgctaatgaaatctatccaggctcgaagagaactcccatctcctccaaccaccggtcaacaactattgcgtctaccacccctccgccacagccggctacacggtgatgatagtgggcgggcccaacgcccgaaccgactttcacatcaacacaaccccagagttcttctaccaataccggggatcaatgctcctcaaaacagtcgacaactcaaccacacctgctactttccaagatattcccatccacgaaggctcgatcttcctactgcccgcaaacaccccgcactgccccgtgcgattcaaggacactgtcggtgtcgtgatggagttgccgcgggctaaggatgcagtggatgctatgagatggtattgcaggaagtgcaaggagattgtctgggagaagaagttcgtttgtgttgaccttggaacgcaggttaaggccgtagttgaggagtttggggccgacgaggaaaagcgcaagtgtaaggcttgtggggagattgcggcgtcgaagtatcaggatggggaaattgtgcaacccccgactcatcctgagtagtatactgatcaggtccatgaggtgaggttgtaattctatcagttatgagtggttatgagtggccaattcaatattcctcgatgataaggatagaatagagatagagtagaatgagacggatacgttcctcggcatatcaatgggcgatccgagtcgaggatatacaacggaacatgggaagcagatatacaccaacgaacatcttattatgaccaaaggcatagtatttattacaagtacaaagccctcaccgtgttcccattcctctgctttcctccagctcccgaaaaagcaaacaccatttattaaccgggtaaccgacccaacaatcatgtactagaaaaaacaccccatagatgcatgcaacagagctgtgacagagagctgtgatcttatgggatacactgaatccatgtctctaatatccagaacattattcatcaaacgggcaatcgatgctttcatgcccatcttgctcacagagagcacaccacttggactcatcgacgactccggatgacttaccagcaacggcagccatggatgaactcagcccgccgataccttttagtccttccatgaccacatcccgtcctgtctttagtgcggggggagtattggtacggatggacgaggctttggtctggaggggttccgtcttctcaattgggtgttcctcggcaagttcatcggcagcctcatgtttgggattcttctcttcggtgttgttctggccagagccgaacatgctagtgcagttcaggatgtcgtggccacctgtttcgcagatctcgcaccacatggtatcctcgtcggaagaacgctcggattcatgcatggtctccagtcgcgattgagaagagtttgacatactacggtgatgatggaggtccgaaggagcatcctgccagtcggtcgggaccactgtacggtcagagagacgattgctgttgggatcatctaaaggattggggacattgcccgcagagtgcgatggcctgtgttgctttggcgaaagagtgacagtagaactgcggcgacgaccaccagactgcaggtgcatttcttgaagttcacgctcgagctcttggatgcgattgtttttgcgatttgtagtttcttccacctcctgcagtcgaatctccagctgagtaacgtgctctggatcatggtcatgatctgccgagttgttctgtccttcgccgctgggatttcctcgactcagagaatgaataatggccttgagccctcggatctcatcatccttctggtccaactcactactgcttcggggtccgtctgcggcggcatgtgcatctttcaatgcagcggcggagtgatcacgctcctttttcagctccagcttggtgcgttcaacttcaccgcggaggaactcgacttcggccctagcctcggcctctccacgccgggcgtcctcgaggccttcctctaactccgagactagctcttccagctgcttgagctgctgcgcaacaacctcaacatcttcgccgcggtcctgcagttccttgttctgctgtataagctcgtcgagacgctgctcgtagacgcgttctgtttcagaggctgcaatctccaatgtgtcgagggtgcttctgaagtctgcgcggtgaacgtcgaattcggccgttaattggataatccgctcgttacgttcacgtaattgtgtgcggaatgaatgaccttccgatccctccatctcctccaaggtcttctggaactcgcccaaagttccggactgctcgtcgagctgcttatctcggtctagcagctgcttctctagactcttgatctgatccttcaagtcttgaatctccgacgagggcggtcgacggaagtccgacggccgtccatacgacgaagcatcatcatccacactaagtcgcgacgatggtctatcagacagccgagatggagccttgacgggactacgcatgccaccgttcagccccgctctcgatgcagtcgacggtgtacgcaagccggccaggcttagtttcggaggaggcggcacgcgcggagattcgggtcgagggagagagggtcgtcggactcgagggcggggagtagcaagagctgcaccgacagatttgctgaagttgaccggccccccacgtgcaggagtaatcggtgtagagatatttgaggatcgccttgtgacatacttgttgttgttcatgggcacgaatataccagaacccggaatcgaggttgtgaagtacttccggccctcaacatcgccgctgtttttgcctctttgcgcatgctcggcgctcagttcgacacctgcgaatcgtccggccttccccgctaccgatcccaagtatttgatcgtcccatgcatgccaccggggacattcaccacgtcaccgacctgtacatcatcgtgcgccattggggagaaatatggggtgatatgaatatgaggagaatagggtgggatgcggcttttaaataatagccccgggcgaatatcgatagcccctggaagggtttggaagtcagggtgcagagggagtgtttaggagaatgcaaggatatttgacggcccaacttccaccatgacgattgggaaggggaaaaaaggaaataagtggaaaacgacaggcccgattagtcccgatttaattagttagaataagagaaatgaaggtgatcgagaaatccaacgaacgcaacgacaagagaaagggggaagacaacaaataaacgggactccactccacgtaatgccaactgacatcctcaacttccaccatctcctcctcggcatatacaaaccttgcctctgagtctctgcatctccaagacatctttccgacgatcttgtccgttccgtacgaactcctgcgcaactaccacctaccgtgccggacgtcaccggggcccgacatctccacctcctgccctcgcatcatacaccatggcgcaatatttcttcgaccttctatacaacttcacggattgcatgtgttgctttcccagctctccacagctaaagatcaacaaccgaagtttcaagctcctacgtttgttgggcgaggtatggatacccgataacgatagctgcaagctggtctgaactgacaacgcaacagggtggattttcctacgtctacctagtccaagataaagcgagctctgaattattcgcgctgaagaagatccgctgtcccttcggtcaagagtccgtatcgcaagcgctgaaagaagtcgaagcctacaacctcttcaactcccaatccaacatcatccactcgatcgaccactgcgtgtccacagaatccggctcgaaattcagatccgatggcggagatccaggctcgaaaacggtctatatcttactcccatactaccagcgcggtaatctccaggatgctattaatgccaatctggtcaaccataccaagttccccgagaagcggctgatggtcctgatactcggtgttgccgatgcgctgcgctcgatgcatcagtatcgggtgaagaacggcgcggcgtctacgcgaaaggtgaaggctgttcggagagaaggcgaggaggcagacgacgaacggaccatgcagatgaaacccaaacggagggctagccatcgcgttcctgagaatgaggatgaggagaatgagcctctaatggatgatgaggtcacccggagtcaggaaggtgtcgaggatggggacctgcgcccctatgcgcacagagatgtcaagcctggtgagtggccgcacatgcggaaattccgaatcgactcgacgagctaactgtattacaggaaacatcatgatcgacgacaacggccaatctcccatcctgatggatctaggctctttggcacccagccccatcgccattacgtcgcgctcactcgccttggcagtgcaggataccgcagcagaacacagcacgatgccatatcgtgcaccggaactcttcgatgtgaagacagggtcgattattgatactaaggttgatatctggtcgctgggctgcacactctacgcctgtcttgtgggcaagagtcccttcgaggcgcgcagcgaagagaccggtggcagtctgagcatgtgcgttcttggtggtgactggcggttccccgatgagaagtctggcgcttctaagggtaaagctaagtccggcgaaagtgaggatgcgtctaagaatgaggtccctgcgatcagcgcacccgtcaaggatattgttcgcaggtgtctcactgttgaaccctcggaacggcccgacattgacgagcttatcgagctcatgaagagtgtcattgatcagatgcctgaagatgatgcgggcccatctcactgagatctacttggatcttgcttgttttctgttttatctgcgttcttctttttgaccggcaggctccgtgtgggcggtttctttgactgtacattatgaatgcgaattgatttttgtgatatcagggctgttcactgtctactttttgctgttcgaattaccagtgtgtctataagttgcaacccataattctactcgatgtttatcgccatattttttgcttcagtcgtgactctaccatactccgagatggcttcatgatgacgacatgccgagtttgtccacgattcacaccaagcagagatctctcaacccaatccaaaccaaacagaatcgagcacaatgagcagtaccttcgatgaccatacacaggggacggacgtgttgaatctgttcccagaccgggtgaagcacaaaacatgtaccgccacagccccaacccacgcggtataaaaactaatctccaccgcatagttttaatatccggcctcagacgaggtgatctcgccgcaatgaccgcagacgtcctcgcgcacggcggcgcagggaccatcatatacacaggccgctcaaagcacgaactccagcctgtgatcgaccatatcaatcggaaatacaaaacagtcaaaatggtctttgtaactgcagactccggcagcctgacttcgttccgcgaggcagcgcacactatcaagaagctgggcgtgtcgattgatggcttcgttgggttccccgaggtcatggctgtaccgtggtcgctcacggaggacggattcgagtcgcatttccaaaggaattacctgtgttatttcctgctgctgaatctgctgcgtgatgttatggggcccaggtcgagggctgttctggttacgtctagtttgcggaatgaggcgcctgcgcctacgtgggatgatttggggttcgaggtgagtgtgattcttttgtttggattatatgtatacttgctggtgtagaagatgctgatttggatagaatggagaaaattaccattgtctcgatgggtattcgcagtcgatgctcgcgatcatcttgtttatcaagtcttttgcaaagaagcatagtggatctatcgctgccttttctgcaaatccaggaagtgagttattaatgtcgtgaatgtgtttttgattctcattctcattcgatctagataccaaaaccaatgtccaaacatatgttggatgggaggaggtcaaatcctggctgcagcggaagaaagaaggtacgtccagataactaacagatagcgaagaccatttcatttgacaggatttcctttatccagccggcgaagacctaccggttcttttgcaacaagcgccgaagtccctttgtcagggtagtggcgctgtcttgcgcgggttgctcgatccggagcttgaaggtaagataaccatccgacgacaatgtgtctgtactgattggtgggtatgagtatcagcccaatctggagcctttctcgatcattgccagaccccaaaactaccccatctcgacttcccagcaggcgaagagagtgcagaggcgttatggaaacgaagtcaaaaattagttgaaccgtttctttcctgaaaggggagagagacttaggccgaaataggaaggtaatctatgctatcaaagtatcaaaggagtataggattccgagattactctgatatcggactcgacgatgttctttgtattcggatatctgcagtgaaagtgatggctaaagagactatatgccagtctatgccagtctataaatccatacaagcccatagaatccctagaaatccaagatataaaaacagaaaatataagaatccttgccaagaccttctttgcggggaaaagttcttatcttttctcctcgcctcctcttcatcttctaggaatctcaacatgtcgatcttcgatcatatctgtgttatctttatcccttcgattcggctgccttgatttaaactggctctcctccggtaaataatatctcatacttgagcgggcttttttttctcttgaatttaccccattcatatatataggaaggaattgtacttcaccatggcgccagtcatcgacagcacagtcatccctggcaccgtgactctggtagacgtggatcatgtcgtggagacccggcacttggaccacggagaccgtgacattgtattgatcccgaccccgtcaaatgacccagatgatcccctcaattggagtccgagacggaagattctgtcgactgcttgcgtgagcatgtaagtgcaggctatgacctgagccgaggatcaatgttgactttctagctatacgatgttctcaggaattgcctgctcggtcgtttactcggtaattacgccgctgcacgaacaaacaggattacccattagtactctgaacgagggaagcgggtatatgtttttgttggctggctggggtctgctgttctggcagcctttcgctatgcaatatggcaagcggccgacatacatgttgtcgttgatcggaattttggtatgtcattcttaattattttggatatcacttgaacagtatagctaacaaccctagggtatgacgatgtgggggtaagagcaccataatgcccgtgatgagacaagactaacaccaatcagaccatacgcaagcaccaagggccaatggctcgcaagaaacatcgtcttgggtttcttcacagcacccgtagaagcgcttcctcagatctccgtcacggacgtggtaagtaaaaccccatgaggaaatgactcacgcttacacaatatcagtacttcacccacgagcgaggaacatacatgggtctttatgcattcttcctagcaggaagtaactacctagcaccggtcatctgcggctttatcgctcagtaccagggctggcggtgggtattctactacccaagtatcttcgtcggcggtgcccttatcttcctcttctttttctgcgaggaaacaaactatgttcgagcacagcccgacgagcctagcactatcgcggaaaccccaaaactcagctcggaagaccacgaaaaagagaaatctgtggatgttgacatggaagctgccactagggctagtataagttcgggctacaccaagaagtcatatgtgaagaaattggcgctctggggaccgagtcaggagcaaaatacttttttccggcgactctggcagtgtctttactacctgtcctggccggtaatcttctatgccgggtatggatacaacgtttttgattttatatacgttttgactaacatgcacacagcttctcttacggatcctatctggtttacttcaacatcatgaatggaacagcctctatcattcttggtggagagccatataacttcgggttggtcttattattacccgaacaatgaacggagcaagctaacaaatcccagatcttccatggtcggtctgagctatctagcacccatcaccggtgtggtcctggggtaagatcttcgccttggtccgatacttcaacgcaagctgacagtaatagatcttttttcactggccgatttagcgactggcttactgtggaactcgcccgccggaacaatggcgtcatggaggcagagcaccgtctctggcccttcctagcttgtgtggtgcttgtgcctgcttcccttattctatggggggttggtgctgcccatgaggtccattggtttggactaattgctggaatgtgcatgctggccttcacgaatacatgtggcatcacgctcagcgttaattactttattgacagctaccgagagttgagcggcattgccatggctagtgtgattctgattcggaataccatgggctttgcaattggttatgggtaagttttactcttccaattctagcagacaaacactaacttcgtttagtatcacgccttggattgagaacatgggttaccagaactgtttcatctccgctgctttcattggcatggcatgcgcctcagtcttcctcttcatgattaaattcggaaagaccttccgtgaacgttcccgcgagaagtactggaagctggttcaagagaactgggagaagggcatgggcaattagaatagatgcaccgttataatacacgtatacagctcaatagaccaacatttattacacaggagtctgttcctcagcaagatgaatagccccttcatcatcataaacaatctccctcaccttaaccgacctcaaatgatcgatcccctcagaaagctcacagtcatgataaaacaagtaccatttcccctggaactcaacaatcgaatgatgcgtcgtccatccaagcacgggatccagaatgcgtccctgatacgtaaaaggcccccaaggcgagtctcccgtggcataagctaagaaatgtgtatcaccagtcgagtaggagaagtaatacgtcccttgataccgatgcacccaagcggcctcaaagaatctcctctcatgatcatctgccagcaagggctccccggtctccggcgcaaggataacaacctccttcatcgacgacacaagcgaaagcatatcatccctcaacagcgcaacacgcggacaaagcgccctaacaccctcgccagtaggttcctgaggtccagacctactctcatcgaaaacaagtctcttcttccgtccagcaccctccccatcaacacattccccctcccccccatcctcatccttcccctcaacccaacattgcaactgtcctccccaaatcccgccaacatagagatacgcctcgccgcccgcttcttcatcaacgaagacagcaggatcaatgctgtatgtaccctggatataattatcctgcgggatgaacggtccttccggggattgagagacagctacgccaatacggaatattcctttgtggtctcgggccggaaagaataggtagaacttgttattcttcgttgcggcatccggggcccagagttgctttgagacccaaggaatgtctttgtctcggaggacaacgccgtgatcggttacggggctggtgattgtgtccatggagaggacgtggtagtcggccatgtcgtattggtcgccattgtcgttgaaggtgattgttgttttgcggtcgtggctggggtagatgtagagtttgttgttgaagacgtgggcggaggggtcggctgtgtagatgtgggagacgagaggtttgggcatggtagtggtggtggtgatggtgaggttatatagggctaaatgtatagatggaagagctgggtatttaggggattgaaggctattaatatttcattctctactatcctaccatgttactatgctaaattatcccctcattatcccactatcatccccttattagcctatagcttgtctctatactctatacctcttttaaccgacggctaaataaccacggcgcaaagtccgtctcagaaaggaaacccatgcatagcccggattcttcatgttctacattctgtctatattccatttcatcagaaatcaaactcacttcaagttccaccgatgcccctcctcagcatacgctctttgcaacgcctgctgccactcccactccatctggcgtagcacctcatcttcacctccattcatatcttccccattatcactaccactcccatgttcatcatgatcctccatttccgcatcctcctcacaccccatcaacccaaaaaatcgccctaacctccgcaccctcgtagggagatcaatggtcttctcctccgccgtgccaatccacggggtaatatgaacaggataattatatgtggcagggacaggcgggtagacctgatggaaatgacgggcgaggttatcgacctgctccgaggtcagaaggttgtaggctagcatgtttggtgggaagtccgggtgttggaggcctgtttcgcagttgacgaggggccagaggtgggaggagaggtggcgaaggaggggtaggaaatgagggtggaagttagggctttcgcgaaaggtgatgttgggatattcaattgggaagggggattcggtgaggtctagaggtgttatgcttgcggaggacatgctcattgggcttagggtatctgctatggttgtggttgatgtgcagattgagagggttcggtcggagagccagctgatgctgtgaggggagttgggggttgtcgggtcgttttccattttggtgttggtagttgtaacggtggtagtggcagtgttgaaagacaagataaaatacactatgcaaagtatgaagaatgtaaattaaggaaaataaggacacttatatagatgaaatgtatgcgattgtcgaaaacttcaaagaaccaacgacaatgagatgagacgtctcgaaacagcctcttctttataacacaaagacatcgtgagctctccaatcaagccgagtttcacgcacaacccccttctccgctttgtttccaagaaaagaacaataaccatgttcataaatatctgtcatatacgtttcatattcaagttgagtctcccattggcccaaacggccaaatcaaagagaccgttgtcatcacagcgacaaattacccactgcgcgtgacagatcgggctcctctgacacagctggcagacccacgtacttgttaatccagttcaaaacggtccggtgccacatgagcgagttttcagggttcagaacccaatgattctcatcagggaatgtcaggaacgcactatcaatgccgcgcatctggagcacattaaacgcagccaagccctcggcgatagtcagacggtaatccaactcgttgtgaatgatcagatgaggcgtgtcccagttttccgtgagccgcgacggatcccacttcgcccagttctcgggcaccttccagattggccctttcaggtcgtgtagagggaagtattgttcttcactagccatctgtgacgtcatgctaaacactccgtcgtgagtgactaacgccttgaacttgcgaccgagcaggtttccctgcatccagttcatcatgtagccgccatacgaggcacccagtgcaaccgcgcgtgtgacgtcgacgtactctaggtgttgctcgatatagtcgaatcctttgactaggtcctcgtagggccgaccgccccattgtccctggattccgtcggtgaagggctggccgtagcctgtactgcctgttggattgggggttatcacaacataaccttgttcagcgaaaacagcggggttccaacgcgtgctccactgatcgttccacgcgccctggggtccaccgtggatcaaatacgcaagcgggtatttgttcccgggtttgaagtccgacggcttcacaacccacgcatggacagggtggtcttcggctcccttgaaccatatttcatcgacctgagacggagacaagccgaatgctctgccgccccgcccgtttgaggataccagttgaacatcatctgggcgggccgggtcgatgatggtccacaggctgttatctaccaggctgctgctagacacgaacaacttgggtgatttagcagctgctggaacggcatcgttcacgtatcccgatctggtcagtctctttaaagagtcgggcttgattgtgtgcgcattctccaatggcagctggtaaagaactccgcgaccggcctcctcgacatgaataagcagtgacttgtcatcatgagcgaacgatatagctgatggactgagatcccagagtccttcgccgtcgtccgactggaaaatttcgatcatatctccattccacgggttgggaacatacaagatacggttcttatcagactcatagccatcctcgcgcatcgtcagaacggcaatagagctaccgtccgagctaaggacaggagacgacatcgctccctgaagaccagcaaccttgcagattttcggtccggggtcactcatactagtccacgagaacatgggagaataatagcatgagcaagaggtatgagtcgcggggtttaagttaggatctttcgcaataaagacaatagccgacggactaatatcaaagtctgcagtaccaccaaaaggcggaatcggcgactcgacgcctgtcagccccgagaccgcgatcaagtttgtgaggcccgagatggaatatttcccagagcatctacgggccggtgacagaggagcctgttctagcaagccatagaagattgcgttcttctggggctcgacatacgagtcccagtgcctaacaaagagagacgtgtacagttttccggttgtatggggcttcttcgcatcgtggggattgtatagcgatccgtctgtattggccttgcctgtcacggcgaagccgacttttcctggctccagaacgaccaccttcaagtccgataccgggcctgggacagtgcctgcggtgtatgtttcattggcctggcgggcatcgccgacaacaaagcttgtattgccgttgcctttggtctttagccagacaagtttgtcgctgtcgtccacccactgtgggttactggcgccggggtcgttggtgataagggcagagcggccagagctaatatcgataacgcggatttcatttgtcttggcatgagactcgaaggagtaggatgtctgcgtgtagactgctagtgtgccggctgcattgggggtggcagaggaccgcctgggtgctccgagcaggaccctggagtaatcagtgtcagcccaatgcccccaaagacgttcaatggatattgatgtcaaactgtcaagtatctcaagactacttactcgggagtgaacttcatgttccgaatggtcatatcagatcgtatgggagataagataggaagctcgggggagcttccaggatcggattgagcttaaatcgaggtatcaacagggtctaagtatagatgaaaaacgaaaaacacaagttatgtatgctattgatgataccaagacaaacagggtatgagaagaggagagttggagaagagaagatgaggctggggagcaacgtgatcatgcgggggttacggtctggatcgggttaagcgccatgtaccttgcaggcatggcatatactgtgttacatcgaggaagaccaaagtaatatggaaccgattttgtactcttagacttcggaaatttaactattattacaaattgtaaaccagatcatgacatttactcttcctcttcctcgctttcatcttcgtccattccctccgccgcattgacactgaacgtaggagcctgatccacaccaacatagctgtcgctcataagatagagcgtcaactcatggtttccaggtgtagggactacatattccaggcgcagctcgagcttgcgaccgatggtgactcgtttgatagccagcaggctcttggtcttttcatcgccgacaaccaaccaccagttctccatcttctggttggggtagaatggtgcatggacagtagcgtcgggctcctcgtcttcttcgatgtcccgctcgattttgaccttgaggtatgcgggttcgcccgaagtgataccctcggcatcctcaacttcgaagtcaagctcgatgttgggatacttctcattggtgaaagccgcagcttgcgccaattgtttgttgtcaaggccgaggcgcttgaccaaagtagcgtaatccttgttctctgatggatccatggcctccatgaattcgaagatatcattgattctgtacaaagggtcagcaaatgtgtctagagatatttcgaacgatacatacttgtactcattagccaccttgatcacctcattagagaagtggggaatctgcttcagagggctgtcacgatcccacatggcctgaaccaccatctgggacagttccatcgcgttcatcgcgttgagatgaccctcggatgagaggacatccacacaagcgctgagcaggttgaggaccttgcgaacgatgtcttcctggtccttggcaagatcaagagggagctgcatgcgcgagaagtgggcctggaggaggacgaaagccttgaaatgaggagagtcgaaggaaacctctgacatcttgaccggtacacgatcatacacgcgacggagaatgtgattctcatggcgacgcatctggatagactcaaactcggtcgccgatgtcacaatctccaggatacccttgagcttcgttcgagacgagagagacaacaagaatgtttgcattgtgatgaaagagatgttgtagtaagcacagatcatagcagcgttcaaaggcgaaacgctgtcatcttcttcatcaacatcgatgatctttgcctctgacaactccttcaatgtattctccaccagttccgagaggaatgtgctgagtccctcgtggctcacatcgctaaggccgtagaaactggggtttgcaaggagacggcgatagaaataggtgtatgtcatccaatcaaccgcatcctgggtggaggagatggtccttgtgctgacttcagtcacaaaggcatcgtggaggtaaacctgcaggtgactctcgacaggcaaggcctcattcaagaacttcttgtagtagtcgcgcttcactgctggcaccataagaacaccacggccaagcttgtcctgaccgggacgggaggctttgccgaacatctgtaggatatcgctgatggggtagtcgatgtagcgatgttcacgaccatcgaagaattgggtgttcataatgatgaccaagtgagccgtgatatccagttcccagcacacatctctcgaagctaacagcacctgaatcgcaccaatgttaaacaggtgtaagacaatgcgcttgtcagtggcattgagagcttcatggtagtagccaataccgtgagaaagcgatgtggcaagagtttgctcatggacacgttcaagcaaaggcgtaagctcactggcatcggcgttcaggaaacgatcttcatcgttgtcgatagcacacgccgagagaagatccgcagcggtcgcacggacctgcttgcggcttggcacgaagaccagagcaggcttatcgggagagagttgcaaaatcgattggtaggccgggcgagccattgcaagcatggcggatgggaagtgagggatggtgaaagattgaaggtggagctcaagaggaacaggacgggcatgagggctgaagttgtagatggtgtgcttgttggcaccgatccactctccgatatcccgagcattagagagaggcacgctaagaccaacaatgcgcatttcattttcagtctggagagcgatgtagtgcatgcgagacacgatcacttcgtacacgtatccagcatagccaccgagcaagtgtagctcgtcggggatgaacagttgcactgtctggatgttcttacggcgctgccactggcgcgacaacacatcccactgagtaggagtggcgagcacgagatcagcctgttcaagaagtttcaaatcggctgtggtttcgcccgtgagcttgacaatggttttacctccatccagtccaccaagacgcttctgccagtcagctagccggtgatcaacaagctcctggaaaggcgcaatgtaaactgcgcggccgctatcctgtcttgaccagtgacgaagcaaggccaactcagcgcaaacagtctttccacttcctgtgggagcaccgatgaagatattgtcattggtgtcgaatactgacttgaagacctgagactgaatcttgttgaaatgctgccagttggggtacagtgcttcgtagtcctcacgcttcagtgctttgacgggtgcgcgctgcatgtcgagtagaggcgtatggggagggaaacgctcgggaagaaccagcttctggaaggacacggcaatcttcgtctcagaatgcatccatcggtcagacacaagcgatatgaagtagttaggaggcatcgggtcagtgacaggaacagtgaattcgacgagatgctcattcatctcggacttggcaaattcagcacgaagcaagaatcgatcatggaacaagatctcctctccgtcacagtcctctaccaaaatccagaaatcttgagcgttgccatgtatttcgtcatcccagacaaaattgggggtaatggtcaactctacccgcagcatggatcgcgtgatgggctgcacttgagcttgaacatcgagtcgagggaacttggataccaagtcgcacacaacacgtccagccttgggcatgctcagaagctcacccatacggggaggatccaaatcgaaataactgctccaaggcacatcaatgcgctccgccttctgcaagacgtcccttgggcagtgagggaattgacgaaggggggacatagttggccacatgcgcttctcggccattttgcacagatcgagcgcggtcttggccactgaggcccagcctttcttcaggcaaatctcgaaaatcgcgcggatgatacgtccagcagattgagtgacatagaccatgtctgccatcagggccagcccctcaagcttgagcctagagatataagcctgcaaaagaacattgattttggcatgaggttcatcaatcgtctccttgacagggatgggcacccggccgagcagttttcctaactcaagcttctcatcctgacggaccggaatgtatttaaactcatcactcaaggcaaagattcggaataattcaatgtttgtaatagagggctggaggtgttgggagtaggtcagcattgagttgtgaccaatatagtagtgcgaagagatacgtccaagctcagtcgactgcagacgcccagtcttcttatcatacttcacgagaccggccttctcaagtaccacagcagcggagtgaataagatcaactcgcttttgctctagtgcatcatcgttctgataatcggcgccaacactgtacaggccaggtgatcggagcatccgaacgtaaaggtatgtgtagcctagccaatccacaccttcatcgcgggtacggacattgccaagtacaatctcagcattgagattgtccgccagtttgctcatcagctgcgactcaattggaagctgttggttcaagagcgagaggtagtattgaagttcagcttgcgatgtgatgatgataccctcaccgaaggtatcatattgtggtcgaccagctcgtcccaacatctgcagaacgtcttgcgggctcaactcgacccaggcacccttctcgggggagtagacctgagttcccttgatgatgacggtgtgggcgggaaggttgacaccccaggctagtgttgcggtacaaacgaggacttggatgcttccatcggcgaaaagagcttggacggaatcacgatcggcaagactcagaccagcatggtgaataccgagaccgtacggcatgagatccttcaggttagcatcgtccacagagtctgcttcttcggagagaatggcacgactagcagcgtcactgcgcagaatctgaccaatggtttcattctcaagagccttgtctctgatgtacttggcggtcttggcagtctcctttcgagagtggacgaagatgagcatttggtttcgttgttgcccgacctgctccataaccttggtataacagatgtcgttcatcgtcttcaactgtttgatggccttcttttcggtgacaccgatgaattcctgcttgagggggcaaggacggtagctgccgtcgaaatggaacgtgcccttgacaggatctgcgcgcaggaaacttcccacatcacggtagttgggaagcgtagcactgagacccacaattcgtacaggctctccagtctgctcggttttgcgaatcgttcggctaacgatgctctcgaggacggggccacgttcatcgtggagaagatgaatctcgtcgatgacaataaggcggacaaggttggtgtagctagtttcagttgcctttctggtgatgacgtcgtacttctcgggggtggtgacaatgatctgggtatcggcgatttgctgcttggtgagctgacgatcacctgtgagctcggacactcggataccataaggttccaagcgcttgccaaggttgccgacttgttcctgaaccaaagccttcaagggagagatgtatacaattttgaagtcatccagcatgatctctcctgtttcagggttgcgattcttcccgatttctcgaaggatcgcgagcatagcaacgttggtctttccggaacccgtgggagcacaaacaagcaggtttccatcgtcaaggaaagctgagggatagcaccttgtctgcacacggttgagttcttttgaggttccaaatccaacacgggcccattccggcagctcagtggtcgggatattcttctctccagcctccttcttagccttaggtggtggcacatggatctcttcgtaccccttgaatcctcgcttggttgagccctggggaagcttgacattggcattggtcataagatgattgccttgatggaagaccaaattttccaaattgattgttctcttgggctggagaatgccagcctcgccaccttcggctgttttgtaatcggtagttggacccgaaggaacatcgacatccatcaagtcgaacttcatcttcttacctggtggtgctccaagttcgtcaccggtttctttgccacggatttcatcgaggatggcacgttgaccggcttcgaccatctcaatctccacgagattgcgcgcagaaggatcctctgcgactcttctccagcgagtaacccagacggccttgtcacgattggtaactagtttggcgacaagatcgggatggtcatagtcgaagagttccatgaggtcgttctcaacatcgcgcaggggtttcaatgttccatcctcgtccttcccaccgaggatttcaagtgcttcatctgttttctcatgttgaatgtgagcatctgtgtatatcgcaccgatttgacgttgcagccagtaagcgtcaatttcgcgagcggagacgttcaatccggtcttttctgtggctttatcacttcggccgagacctccatcgatgaccatttcatctccgtcttcgtcttgggctgctgcagcatcgtcgattgcgagtcgttcctgttcatcctcctcttcttcgtcactgagctcgtcctcgtctcgaacctcgtctacggttcccatgcgctcatcgtcttcatcttcatcgaaaacgacggcaacaccttggcgttcatcaagttcgccaccctcttcctcgagaccgccttccacctcttcctcttcgtcttgggcatcgtaatctgtaatttttttgccgaggttcaccagctcgttgaactccttggggttcattgaggtacccagaagatcatcaatctccttctttttatcaaaatccttcatatcttcgtccttcagtagttccaaaactgcatcggcagcacttcgaacgacttcatgcggaacatcgcccagctggcttccagtgattgtgagaataaggtcatacgtggctcgtgtggcgggtgtgcggggacgatatttcaatccttcgacgaaggcatcggcggctgaaaggatgccctggcctcgaagttgtgctggttggccgcggtggcgctttttctgttcgcgtagaagcacatcttcaccctcgccgattgcaccccgctcaagacctgtcggggctgcctttttagatttgggcgcgtcttcacgcgcgactcgtccacccatctcccgaatcccaatgcgacccgctagagactccgggtctccagtgggttcgtcatgggtgcgagtgataaaacgacgatccgcctggagaaccaggttggacatcgccgagtacttatactgtgagatatcttggtccgccatcttgttggttgtatggctgaatcaagggaaaaaggatgaaagaaagagtgagttgcgacaagaacctgcctgcggagggtcaagattcaggccgcgccaagacacgagatgtcggcgattgatcaattttaaatggtctcacaaacctggctcatcctcctgccgcaagtaatatcacttgtaagggagaaatatcagccaaggttgtagctagtagatctcaaggagagtgcagctcgggaagatttcggtggcgaaggcggaagaggggagcttgaatggttctgccactcgaaacggttcgggggcgcgtcgcaacaatgcgcgccggtctctctcgtcgtttaatgccagtttatatgaggcctctggcgactttgatacgttcatctgatcgttgtaacattcaccggaccatatgtcaccatgcacgtcgaacctccatacaccaacgcgtgtacaccgccgcatcgaaagtccacaaacaaggcgcaaaaactaaagcgacagtaaagttgaaagaccttcctcaaggagttttgaaactcgaggcatacgatgatcaggtggatgaggctcctcgttacccgactgtggtgcaggggcaccgaaacaatatgcaaacgttcaagaattgtgttatcttgacccgggtcgggggcttctatgaggtacgataataggcaccacatggctagagagctccatgctgagagtgtgttctgtagctctattttgaacaagcagaggagctggcaccattgctcaatctcaagctcgcgaccaaaaagaccaacggcgggccggttccgatggctggctttccctttttccagcttgatcgtttcctcaaaaccctcgtcggagatctcaacaagtatgtggctattagcgaagagttttccattaatgcagaagacaaggcacgcacgagcggcctcctctttgatcggaaagttgctaggatcatcacacctggcacgctgattgacgagaaattcattgaccctaccgagcataattttttattggccatatacttggatgtgccgtctttgaaaatccaattgaagcagcacgctgacaaggatctccaatcatcgtatcagcatatcctagcctctgtgccccaacaagtaggattgtcatggcttgacctctcaactggtgatttctttactcagctcacaacgagtcaaatgcttccgtctgcgattgcacggattggagctcgtgagattttggtagatcagaatgtgcaagatcttattggacatgaattgcaattgctcgttggacacgatcatcgccttgtcaccttcttccaataccctggagaattcaaaccggtatctgaatgggggacaatgttagagtctcccgttcctgaagaaactcacgcctccttcacaccagaggaagtagcagctgggtacagcctgcttgagtacattcgcgtgcagttgcaaggatcgaatctcaagcttcagcctccaattcgaagacatttgaatgaatcaatgggcattgatcgtaacagtctgagtggtctcgagattttagaaacagccagagacggttttgggaaaggaagtctccttcacgctgtgcgaaggacttctacaaaaagtggtgcacggcttctacgagaccggctaagtatgcccaactaagagtcaaaagcttttgtatagctttgctaatgcattacatacagcctccccatctacatccttacgagtcatcaatgagcgtttggaccttgtctcggtcttcatagaaaatgtcgagctccgtgacagcgtcatccaacttttgaaacgcagccatgattctcaacgcctagttcagaaattcgcatttgggaaaggggacccggatgacttgatttgtctttcccgcgccattgaggcttctaaggaagtcagacaagttcttctagatcacaatagactttcggtctcatccaatacttcagatctgaatcacagtcttactatcatgatttcacggctttttctcgatggtcccattgcgctggcggatcaaattcttgcagccattgacgaagaaggcttgttacaaaaacaacgcatcgaggatagtactgccgcagaggcagccaatctggcacaaaaggtcactatggatgaagccacctccagcgagctcgaagcgctgccgaaaaaggtcagagcaaagaagggcgagcgaacagttatggctgatacggactccggtcctatcgatacctggattatgagacgtgacgctagtaagactttgaatacactccacggggacttggaacgattgggcgatgaaaagacttcattgactcaacgtctccgtgattcagttgattcgtcagccctgagccttaaatggaccccagggttgggccacatttgccacgttaaagggccaaagatatcccagaaatccctagaagacttgggggtcactcgaaatgtctcatcgaccaaatctacccggtcattctatttaccagcatggacagagctaggagtaaaaatggaccacgtcaaggtccggatccgtcaagaggagcaaacgatctttgaacgtctgcgccgcgaggtgatcctgaaccttgtcaaaatccgccgaaacgcagcagtcatggatgagctggacgtggcgtgttcatttgcaactctcgcccaggaacaacaaatggtacggccgattctcaatgacggtacctgtcacaatattgtcggtggacgacatcccacggtcaaactggggttggaggaacaagggcgatcgttcgtgagcaatgattgcttcttgggtgattctgagcggatctggctcattactggccccaatatggcaggtaaaagtaccttcttgcgacaaaacgccctaatcacaatcctcgcccaaatcggatcttttgtacccgcagcttatgccgagatcggtatcgtggatcagatcttcagccgaattggtgcagcggatgacctcttccgtgaccagtcgacgttcatggtggagatgttggaaactgctactattcttaaacaagccacgcccaagtcatttgtgattatggatgaggtgggccgaggcacaacgcccgaagacggtacagctgttagctttgcatgcctacatcatttacactatcataaccagtctcgggtgctttttgctactcatttccatgcccttgcggatatgacggaggactttgccaaattggcgagatactgcacggatgtgaaaactacggcttcgggtgccttctctttcgtccaccgactgcggaaaggcgtcaatcgccagtctcatgctctgaaggttgcccaactggctggtttgcctaaagagaccctcgagcttgctatgcgggtccgccaggaaatgaaggatgaaattccaccatctcgagttgctgatggggatgaaccctagcatcagcgtgctggaggcgaaatgttgtggctaatgtgtatcacttgaaggtactatgtaagatatttatgtacaattttcggcttctcctgttaaagatcccactaagtcagaaagcaaggttggcaaatgcctcactcgcatctttttttttcaatccaactgtcggagtcttcgctttcaccctaggaacccaaattttgcgattgtttcgtagacgttcattcacacatcaaagcttaggtgaccacaacctcggacccttctcaatccgaccgtgttgaccctcgcgaccaagatcaacaacaagaccctccttaaacgcaacctcctggcaatcctcacccccaaccccattaacaaactgcacaacaacgaaatcaatcctcctatgacccaaaactaccataggggcatgccacgtgccaacaccataagtcacagcctgaccaccacgcgccacaaacgccttaatattattcagatccggcgggtcacgaatggtgaccgtctcgccggcctcattctccgcggtagcagtcctccactttagagtgggggcaaccactatcaaaaacaacggttcttcctcatcatccccgaccttggaatgggcggataaatcgaccgggatgaaagtttgattagtaaacgggtggcgctcaaggatccgcacgtcaaagacctcccggtctggcatctgggggccgccgctgacagtgcgcaaaacgcgcgggaagcagcaaaacatggtcatgcgtgcctcggagggctgcccgcttggacataaattggtgtatcggtcgatgagcggggagatgggactgtatttgagagcggagttttggttcgccagtaccggggttgggttatgtggcggtaggcatgatgattcaggggcgatatttagttctctcggtaatggggagaccactgctgtaccgaacggtgcgaaattctcctctgtcagaggctccggagtgagtgtgactgtcgggttggatgtgaggaccgacaccatagtgagattttaggtgtaggtgtgtgtggatatgtgtgttggtcaatcgcttcgtgttcgccacttgctagcgtgcaggtctacagcttcatgagagagaaaaagaaaggaaattggattggatgtggtttatgaagctaatgtcggcggcgtcctccggtgataagataagcggccgagaccgttttttggatatattttggattcattttcatacaacttggagaatactactcggagaactatataaaaaggctgtttgtaaccattctattttgattcttttgctttttatgttagttcaagtcgcaagctcttcatggtgtattgccacttagctcgagcccgttcaagcgtgataaaatacaccaatttcttttgcaaaattaaacaaagtctctacacataaaaggagctaattcaaaagacatcgtggcattgaagtctgtgcagaggacccttgggattttacgacaattttctcgtacccagataggcatacataggtaatacacagtacatgggagtcaccttatgatatgcatgcatacattagatctatcaatgtcggtgtaagagccctatatgcatttcgatgtacaatcatgtactctgcaaccctggagtacttgaccggttattacaggtagatctaaaagacaacaggatctttcgggatatacgcggaatgacgacgataatagctattggcttactataggtccgttgctccgggactaataggcaatatagaactgcatgaggctcacacagcggtgactcaattctcgttgtcttgctcttggtcaatgctataggaaatacttagatataaagcattcctcctgagagctcggctcattctatcctccttctgatattcaaaggaacctactcgtgcttcgactctacttaggatagagtattctaagcggcaaagaaatatttccagtgcaatatatatcaaacgcaacaatgaattcttccaatcaatcttctccccagcaaccatctacccccaatacaggcagttcaactgctgccgctggaagctcatctacccctccaacaagctctacctatacatatacagagaaaccattgaggtaagacaaatatttgctatctcgcctatactaaagtgctaatacggacccgacaactcaaatagtgacgccgaaaatttccaacgaaacacagaccacatgggtggttggatcaaggacctcgaccacccggatcaattgacattgtctaactgagtaggcaaacaattccactcagctttaactccacgaacatgtcaacaatacggctatttgataggtctgagaatgatacgtgcaagagctggttcgtgcctgaaggattgtcgatgaatccactcatgcattcaaattccgaacacgcccgaaattgacaatcttattcttcttatgacgcctattcggagaaatggcgcactattgcatgtatatttggagtgggagacctctgggactgatacgaacatataacgtggttttctattctctatcctctattttctattttcttttatctttgtctttgtcctttctttggacgacaaacatgtgataggacaaaaattgagggggagagtgactagggtatgcagccactaatcgtcttgcatggtatgccagcgaattggtagatggcaacatttccgagatattcgacgccatgagaacggaggtcaacaccgaataaggaatatgatgttttagccgagcatggacattatgtgttgtctttgatgtgtttcccctctttttttcctatctcgggcaattagcctccgtattcgttattaaaatgttaatattatgcgtggtgctagtggtgctagtgatgcgggtcaccaacttatttgatttggggtggaatcatttaaacgtgcatataaatgtaacatcaagttatatgcttgatgcagtcgtgcccaaagtaagcttgtgggattttagcgtcctaatggagtcagatacagcaaggatggcatagccaagctgctagtttgccgctcactctgctaggactggaaaaagcccctagcacgtatgaagctctatccccgagccactttatgtgtaaagtataatcatttccacactctgccaaactcatacctacatgcagttatagttaaccagtagcagcttgagggaaaagcatgctcggggtaaacaactgagaacttcaccttccgggggcctcgaatccttctacaagagtgatctatgagctaacgacttggtatcgacacctctctctccgatagaacaagaaaatacgtctttggatagaaacccgatgacgggtattgattgatcaaaacgggcagactatggaatgaaaggcctggatgatccttagttagacaatcatatattcgcttctggctttccattcccctgcagggaatcaagtcttcgctttcgcatcccatgtaagtccattcagcgagcaataaattcgatctgctcgccttttaccgtcaccgccgaaaggattcattttattggaacataaacccgagcgatggcaatcgctaatcgtttcccattgcttgatcatagtatagatgatggcagggctggactcccggatatcgacggtgactgatagagccggaccagactcaaataagtgggccgtatcgatcaagcaagatatcttccttctgatcaatttaccgagtgtgaggcctaggtgtgctgcatcgcaactctcagaacactgagctggacctttcagcagtcttgaaatgtgttctttgatcattaattcgaatttttcgatgcctttctgtctacattgatcaattttgtctagaagtgcacgattagtgatttttcacataaatctcatctcaaataaatgcaacgttctattttgttcacatgcctttgatggaatttggaatcgggagattgcttgtgtcaaatggccctgttgcttgctgtatggcaatttttgttgttttctggaagatcacagagtgggaccggaagacacaggagatcatcatccatattttcatgtcttgtgaaaatgaagacggaacaagcgactccagggcttgtatccagattccagcaaacacttcgaccacctcgttgcattgaaaaaaatcagttgccacggcgatatcactcaattgtggtagggtcagcttcaggggaacttgtcgtgaacgtccatggatgaggttcaaaaggaccagaaggatatctggtttgcagtcgttgacgggaatctcaacggatcccttctttgaaagagcactcccttcagcccaacaatctttcagcagtcgcttgaaataagccgatgctagtgctaggtgcttcgatgagacttggaagcgagcgtagtttcccggcacattgcctttgctgatgtcaatcaggggggtttttggtgtgaagagaataatatctccatccggatcaacctgatagggcggatgcaagtcaggtgccactacagcagtcaatatgggtttagtgtcctcctgttcttgagtcgaagccatgggtgtagccgatgttgactttctcaaattcaagccacgcagtgattttgtttggcgcggtgccattacggctgtaggtatgttgagggatattcaacttggccaaccttcaacagagagaagagaatggggagcgagacagagaaaataaacgcgtatttatgttgttgtcggaaatgaagcgtaagcaaaatcaaaagggtcaattgtggatcatttgcatatctacagtgaagtacagagacacgttggacacattctattcctgtacgatataatgaagggtgatcaaaagtacctggttttaggcatacagagatatgttgactttccaaatattctgcaaaaaggctatacaagtgttgcccaaatgcatgggagggggtctttactctttgtatagcaggagacccaagaactagtctctttgtatagcgctccgcctataaatatgtttattgaaggaaagggcagttcagggtcaataatagacctcaggtacaatttttacatgctagcgtgagttgatcatgacagtaattccaaagcctaagctttggatcatcagtagcgcttagcacctgtgtttttgtaagagtcgactagtaaaattcaaaaggatgtgtcttggtggcttggtaagggatactcaaatgataaatccattcatatatgcccattccaactatgctatacgtggaggatgtaaataagttccgagagctaccgtagtaacggcaccattgtgatgatgacaaagcttcacatttgggagtgaagggtaacagtgatgaagacaccgcatcagaaatactctttagacaagagaatatctctgggtaacatattgtttggctctgcagcggcgcgtacatcatcgtggtgtattgagtagcgattgagtcacagcgcttgctccaaaaagtctcaactagaacaccaggggggtgtttcgagcagtttggctcacaacttatgatactcgctaatggtaagccatagtatatcaattcctgccttctggtgacagaggaacggacttccatggcagggaaagtttaaagacgccgtagcaagtttaaatcaagtagcattctctccttttgcgtcaaattttgctttcttggctcgtcgtttgatttctcttttggacaaaggcttgtcagcatcctcgccgacaggctcagaactgatagaagccttcctcttgagattgtccactccattttctggctgcacaggttctttggctttggggttattcttttgctttggcgtgaaaccttcaggtttgactttctccccaccattgacgatatccacgatgcctcgccaactggttcgcttcaacttagccaacgcggtcacttttcgcgactcttcgcagactgcttcctttccacgctcttgtgatagaccccaaacacaggcaagatttatcacgtcccacggggctcgtagacctaaagctcgtcttgcttcgctagacacaatgatgcctcgaccgcgtgtcgcgcggatcaaggatgttgcattcccaatgaggttccttcgggcgtcaagtccactccccgtgatccctggcccatagcagatctcgatgcgaactccacgtgagattgccgcagacagcatcttgaatttgaagtggtatgggagtcgcaccgagagatccacagagatcacgtcgcattccaagttggtgcatgcattcagaagtgacttttcattcgtgggacggagagcaacgatgtcgtacgcttgactcagcgcgtttaggcgctgattctgcgcaggatcggccagagtcaggttcaaccgggtcagcagttggagggatttcggcgcgtttgttggaagcggaggtggagcgaggcttggggggagcttcccgttgattgtttgagatagggctacggtagtgtaaccaactaaacagtcaggtcagtccctcatgtgctccaacctacggatcttgtgccgcagagcggaatgaatgacttacgctcggcaaggaaattcagagtatggggcacctccgggtcatcggggctgtaaggtacattcaggtcgtaaaacatggtgaatttaaaggaaggtcagccctgcccgtggaagttattgctttacttctcagcgctcttggtcacgtcgaactgtcccaaaaaggcaattagaaaatctatcggattaacagaggatccgtcagtgcactaactgctttaggtcgggtccccacaaacctctctgatcccgtgacctcaggcggaaccgatctcgttctactgatcatatcacgacaatatctcacttcgtccatcccattgctcaaggcttcttgtgagcactgtgtttgggctgaatagtcgctgggcctgttgctacctgtctcctacgtctacctaatccccgaccccttcctccgtcgcacggccgagcccctcgtgaccccgccgcacatctttcaattgtggccgcactcggaaaccgcctgtcatcgtcaagatggcgcgtgtctatgccgatgtcaacgagcatatgcctcggtcctactgggattatgatagtgtcaacatctcttggggtgtccttgaaaattatgaaatcgttcgcaagataggtgagagatgatgaaacctgtccttctgcagcatgtcggagatggttgccgctgtgagctgcgggtgaaatttgagaacaagctttctgactttctactttaggtcggggaaagtactccgaggttttcgagggtatcaacgtcgtcaactaccaaaaatgcgttatcaaggtcctcaagcccgtcaagaagaagaagatcaaacgtgagatcaagattttgcagaatctcgcgggtgggcccaatgtcgtggcattgctggacgttgttcgcgataaccagagcaagactcctagtctagtgttcgaagctatcaacaacaccgacttccgcacactgtaccctcgcttttccgattacgatgttcgcttctacgttttcgagctgcttaaggcgttagacttctgccacagcaagggcattatgcatcgggatgtgaagccccacaatgtcatgattgatcatgagaagcgcaaggttagtgggcttatcaaatagttgtggcggaaatcatggatctaacatgttatagcttcgtctgattgattggggtctggctgagttctaccacaagggcacggaatataacgtccgtgttgcgtctcggtatttcaagggccccgagctgctagttgatttccaggaatacgactattctttggatatgtggtccctaggggctatgttcgcatccatgatcttccgtaaggagcctttcttccacggaggcagcaatacggaccagttggtcaagattgccaaggtccttggtactgaagagctgtttgagtacttggacaagtacgacattgaactggacccgcaatacgacgacatcctctcccgtttccctcggaagccatggcactcatttgtcaacgcagagaaccagcgtttcatcagtgacgaggccattgacttccttgacaagcttctgcgctacgatcatgctgtacgttgtgattaacatctctataaatgttctatgctgacttctcaaaggaccgcttgactgctcaagaggcaatggcacacgcatattttgatcctgtgcgtgctgatgcagctgcccttagccacaacaatgtgacactcccctgaattcctctcgcatgaactgttcatgatcatggttctgatccttttactgcgatgcccggcttccaagttctccgcatgctgccatcaagattttgtcgggcatcacaataattacgtacctcttacatttgaaatttgctgatatgaacggcacaacgatgatcgaaaacatgaaatggcttgatcttcgtacttcctgttcctcttctcactggccgttcgatgatggactgcggcaaacgatcaaatcctgaatgaagacgactttgatgacaagacatcatgacatttaatttgctggttccctccaagcctcttatcgcctaggtcgtttggcgtgtcaatgagcgtgataaaccaacgtcttagatggggcaatcgctcttctttttcatcttttcctatttgtatagcgctcgtgggtctccctaattgatttctcccttgttagttaaattggtgttttggcctttgttttgggtgcttcgtgtttcaagggatgctttttcctaagacaacccattgcattttcttaatgtttccctttttatgaatgaaacattagacgagataaaaaagaagtttcaagagaccctagaattgcaatttgtatggattgaacatcgtaggtagggttctatgtatcacgcgtataatatggctcgacccatgtatagaatgacatggtataactatctagactcagaccatgaaacagatatcaagtatgaataacctccaattcagtaaataatcccaatcttcctcttccaatccggttcttatagatgtagcctcagatcacccgttggctccagcgtatcacgtgaggattatcgcaatgtcgtcctggccgaacaaatacaagaaaagacgaattgtaacaaagaacacgcgaagaaaggaacgtaagatacccaataatacccaatgagtgttgactcatataaacacgcttcattgacctgcccgccgactccaccgaacctcccaccaagccccgcgctctcattcgttcattcagcgttggaaatttaattgcccgcatttcgcacaacctcccctccttatacctctccatctctcaagatacttatccggcgattcgtggcgcgatcggcgccttggagatttactcctcaatatcgtgcattctccaggatggctcaaaactctgcctcccaaacccccagtgagtttcatgactcattctcagatgtcgcagaagcttatagtgaatagcgggtgagcctacggctccaacccctcaggtcgacgaacagactcgcgccgagttcgccgatgttgccgcaaaggccccccagaatccgcagggcggaccggccggcgctcccaaggtgaagaccgagaaagagtgtatgttaccaccaagatctatattcggacctttcctcggaagtcgtttttgtataatgagtatttgctgatactgtgggtgattcctagtggaaaaggaacgcaagaaggccgaaaagaacaagaagttcgaagagaggcaggcggccaaggccaaggctgccgccagcaaggccgcagctcctaaagtcgagaagaaggtgaaacccgagaaggacaagaccgccgatgcctacgatcccatttccatcgaagccggtcgtctcgaatggtgggaggagcgtgatctcttcaagcccgaattcggacctgatggcaaggttaagccggaaggctccttcgtcatccccattccccctcccaatgttaccggttctcttcacatgggccatgcccttaccaacgccctccaggacaccatgatccggtggcaaagaatgaagggcaagactaccctgtggcttcccggaatggaccacgccggtatctcgactcagagcgtcgtcgagaagatgttgtggaaaaaggaaaagaagacccgtcacgatattggccgagaggccatggtcaacttgatctgggattggaaagatgaataccacaagaacatcaagaacgccctgcgcagacttggtggttcgttcgactggagccgtgaggccttcaccatggaccccaacctgtcagctgctgtgaccgagaccttcgttcgcctccacgaggagggtattatctaccgtgccaaccgcctggtcaactggtgtgtggctctgaacacctctttgtctaaccttgaggttgagaacaaggaaatcgagggccgcacacttctcgatgtgcctggctacgacaagaaggtcgaattcggtgttctgactcacttctgctacgaggttgatggaactaccgagcgtatcgagattgctactactcgtcctgagaccatggttggtgataccggtattgccgtccaccccgacgacaagcgctaccagcatttgatcggcaaaaacgctcgccatcctttcttggaccgtctgatccctatctttgctgacaccgatgtcgaccccgaattcggtactggtgccgtcaagatcacccccgcccacgactttaacgatttcaaccgtggtaaggcccacaacctggagttcatctctgtcatgaacgacgatggtaccttcaacaagaatgctggtccctttgccggcatgaagcgctttgatgcccgttacaaggtcatcgaagaccttaaggagaagggtctgtacgtcaagtgggagcacaatcccatgaaagtgcctcgttgcgccaagtccaacgatgttattgagcctatcatgaagccgcaatggtggatgaagatggaaagcctggttcagcctgccattgatgccgttgagaatggcgatatcgttatccgccccgagtccgctgagaagagctacttccgctggatgcgaaacctcaacgattggtgtctgtcccgtcagctctggtggggacaccaggctcctgcttacttcgtcaagattgaaggcgaggatggcgatgacagtgacggtaacctctgggtcactggccgtaccgaggaggatgcttgcaaaaaggccgaggagaagttccccggcaagaagttttctctggtccgtgatcccgatgttctcgacacttggttctcttctggcttgtggcccttctctactctgggctggccccgccagactcacgacttcgagaacctataccccacctccgttctggagactggttgggatattctcttcttctgggttgcccgtatgatcatgctgggtattaagatgactggtcaggttcctttccgtgaggtttactgccactctctcatcagagattccgatggccgcaagatgtccaagtctctgggcaacgttatcgatcctctggatgttatggagggtattcagctgcagactcttcacgacaagctgcagttgggcaacattgccgataaggagattgctgctgctaccagataccagaagaaggcattccccaagggtatccccgagtgtggcgccgatgctctccgcttcgcccttgtctcttacaccaccggtggtaggtttcatctcatgtccttgtttgattccatttactaatcatgatttgcaggaggtgatattgctttcgatatccaggtcattcacggctaccgtaagttctgtaacaagatctaccaggctaccaagttcgtcctcggcaagcttggcgatgacttcaagccccaggctggtgttaagaagactggccatgaatccctttccgagcgctggattctgcacaagttcaacatcgccgccaaggagatgaacgaggtccttgagcagcgtgatttctccaactccgctcagatctcctatcagtactggtactcccagctgtgtgatgtgttcatcgagaactctaagtacttgctggcggatgatgcctcggctgaaaccaaggagtctgccaagcagaccctctacacggcccttgagggtggcctgaccttgatacaccccatcatgccgttcgtcaccgagcacctgtggcagcgtctaccccgccgcgaaggtgataagaccatctcgatcatgaaggccaagtatcccgagtacatcgccgaattcgacgatccggccgccgccgatgcctacgagctcattctcaacacctccaaggccatccgctcgatcctgtctcagtacgacgtcaagacccagggtgatattatcatccagacctacaacactaccagcgaaaagaccgtgtctggggagatgaccaccatcaagtctctgggtggtaagaccctcggcgagctgtctcaccttggcccggagaacaagaaccctccctctggctgcgtggtggctgctgtcggctctgatgccgctgtctacctccgtgtctccaaggaggttgcgctagagcaggaagagaaggctaaggctagcctggccaaggcccgtgagactgttcgcaggtctcagggtattatcaacggcgctggctggaaggagaaggtcaaggccgaggtccgtgagcaggaggagaagcgtctgcgtgatgctgagggcgaggctgcccgtctcgaggagcaggttaaggagtttgagaagttgcgtctggagtaaattgtccatcattgggtagagttaaacaaaatacatcaatttattcccctctttcaaccgtgcattcactgttaagtcgtatcccagttaatcagtaattacccatgtaaggttccaacagtaacctgcactccggctcgcccagaaccggtgcagccgatgcgatgtgcatctgatttatatatgatatacgagtcattaatcactttcattcgacagcatccgatgttgtcattactattcctattgcgaattcgggatgttttctgcagtccgtagagatgcgctatacgaagagattatcaaacttcgattttctattacaataatattagcatctttgcaatatctcatttcattgcagtccatttatgtagtatatctgtttcattggtactttttccaatacatccatgtggagatatatattattggatggtatagcaagattatacagcgtggacaatatcaaatatacgcgattgatcttaggagaggaaggttatagttctgcatactaaaaacaaaagaacttcctatattcgatataagattcaataaaaagacttacctctgctaaacatttaaatagcaaaaagaccaaaaatagtttccctgggaatcgaacccagaacctttccggaacatcagcgaatcgcatttgttaacggaaaatcataaccgctagaccaggaaactgctcgaccactggggccaattgatgaatggacaggccattattggcctcatgagtctacaactttgttcccaattatttaggtccggagtaacagaacgaacttgtttcgccaaccttccaacattcgaaagtgggcaatactcaatccacagcggcgagactctcaatggttcttaatacaacggagtattctgctctgcataggaaccatctagacccaatatgaatcgaggatacattttcacttatgaataccgtatgctgccgagcgcatattcgaagctcaaaactacagtaacctgaagcttaggagtatttaccaggtcttgaaactacagtctaccccttgtggcttagatatatgtggctgaacccgggtaaccctatgtcaatacctagtcggccattgcctatttaggtaacaaaaaaatgactacggagtatgccattcgctatattccgcgtatctatggcttatcaaggagaaactaacagactgtgttcgaggtcacatgacctctccgctctcccaacaaccatttagtcccagcagacctccccacgcaactcaagagattttctagaccacctacgttttcatccgtagtactctagattcaatctctcacacctacgttgtcgtaaagcaaacagccgatggaagactgaaaagcaaggtacaagtgccaaacactttcttcatcgtgcgttcttattccccctccctttgctcttctattctcttctttttacttagtatctcttgcattattacatacatgagtatataaattcggcgaccaaaacggtgtccatctactcaaagagcctggggattttgctcaggtgatctgatgactggacaagagaggtgttctgggatgaagatgtgttgtgtgacgctgccgacgtggcctcctgatgagactgtctaggttcaggacctgggtcgtgtgtacaagttgatggattcctgaatgggagaggaaagaaggccgtgtgggagatttcaatacgcacttcccacaattgcgagaatggaaatgaagacatcaaacttatgcgttagatgtgattgagaaagcaatatcaacgatttttactattgcagtgcctaggccaaacctgcaaacattaatattagataactgatttatgtttctgatctcttcgaactcggcgacttcaatctagctttggtaggaactatgaaataagaaatcagttgcaaataggagaaagtaagggcattagtcaggtatatcaactcacgtccaacctttctatttctttcctcgttgctgagtagaagacatacggttgacaaaacgaatagcagatgtatatagggattagatctaggagatgcggcttagagatttctctgtagcctccggccaagaactcttccaagtccgtccgggcaaccccaaaaaggggaagtaagactggaaagtaaataaatgaacgactgcggtaaagttctgagagaaccaaattactcaaaaagcaaaaacatacaacagtgaggattcgctggtggtcacccacccaactactaactcaccggcgtgtggcttgagtacggctgagcggacgggaagccctattttccacaccctatggtcgtatgtatttggtatagcactggagggaagtatataatagctgataactatagactatagccgtgggtggatataacacggcttatatctcatcgttaccattgggtcaggtgacctctacgcctatatggtcatagcgttggatagatacgttaagtgctctcatgtctcgttaagcttcatttccaaaaagttactccatactccgtatattatatagagttctacaacggggcctaagatgaccatggtattgctatacttcattcacactgataaaacaaaagcaaaaaacatacaacagtgaggattcgctggtggtcacccacccaactactaactcaccggcgtgtggcttaagtacggctgagcggacgggaagccctgttttccacaccctatggtcgtatgtgcttgatacgacaacagaggggaacatagagtaatgaagtacaacttcgtaggtggtgaggggtgaggatggatgagaaggatgagtgcacaatgatggggtgagaagaggatcgatcaccctcgggcgaccgccctacccccccttccagctgaattgccgcgcctcaaccaagtcgagaattttagaaaactcctatgtgcttcgcttggtctaggtccttgaagtctggaggtgcttaaatgtgaggacgtagtcgattgcatcaagcaactgcaaaaagcagttgtagtttctgcagctgatcttttgcccgcacagccgcgaatttccggtcccattcagcgcattgctcgtcctcgatggtttgcgcagccgtccccttggctcctggaagtgtagagatacggtctgcctcttcgccgtggcgaccaagttccagataccgtaaatcggctagagaagaggaggttacattcactaggagagaatagtcagataggaaaatctgttattgtggacagtggacatcgtaccttgcgttcggttctttctcttatcaatatcaatggcaaaaaaaaatagatcagcacatcttcatcttcgcagtcgtcatcatcgtctatcaagtaatgacaatactgtgggaaagctttggtgtcaaacaggaagctgtcgcttaggacgacattcgcaggtgcattcttcagaatatgaaagtcaagagggtaaggtgaggtaaattcatcatcatggccaaaacgccattcaacatcataggccataccggccgtctcagtgaccgaattatcagcaaatttcagtcttgtctgatactcatgtctagtgtgaatgtgcaccccaatacttcgtgcgtaagccttgtccataatcaatacctttgagctagaatcagccagagcactctgtacctgaccattaatcgacccctcaaacattggggtagatgccccaaggtataacagatggaactgcgagatacctttggcgaatctttttttcacacgacgatagaaattgacaacgtttgagaacgtccgagtgagcttcaaaaatggcttcccaatgatcacatcgtggatgcagttggggagaagctggaattcaaggttgtgcacctcgttttcgctgctgagccggaatggcacagttgcagttcccgtagtcgtcacttggttcccactgccgatggtgatttcgcaagtggcattctggcttattggtaatcctaagctaatggcatatttttctttcatgaagtttctttttgccccgtaatccccaaccgcgttggtggaatgctctgcgagttgacaaggtatttcgaagatgcgcaccccgcgattagtggaaaaagcactttttgagtccgattcttgtaacatatatggccgacctagagtctttatattttcaatgacccaactacaaagttgggtttggttattgcgtatacgtttgtctttgctctcagtattgcgttattgactaatgctaggagaatggaaatatatggtgctacagccgcttatgctgcagtattagttgtgtctttttcaggaaattcaggggcagtactagcctgagccgtccagttctcgccgttctcactctctcgtcctattcacccacactcaccctaggagaatttacgttacggatctaaagttcttgagggcgcatatcaaattaaccgaacggactatgtgctatatgacctatgtacggccagtaaccaggtacggcccgagcgagatcctgcgggcggtaggagactgcagtgtcgatgatcaaagctgcagagaccaatcaatattaagacggaaatgaatatagatctgtgattggagaaaatagatagcacagtctaaccttttggggataggccgtgaatcagaactcttccatgttagtcgatcttgaatttataagcagtctttgggggccaagtgtagatagatatttagcggggtttcaaagctcattttgctttgcattctcaaagtcctcataccctaaatcttccctgtttcactttcacaatgtcggttggtcctgatcttgatgatgacgctgtattgaaatggctcgaagcggtaaggctatttcttctagcaaatcgcagcacaactaatttacagcgatatttagttccaccgagcgagcgctactctcaacaccgatcagtggcttgatgaattcatgaccgacgatgtggaaatgcaatatgcaaataaccctgtgatcaagggcagcgaagtgcggcagatgttcaaagccgtcctcggccaactggacatgatgacccacgagatccgctactttgactatgtcgcccctcgtatctatcaagccgcaaccatccgatatctcgtcaaaggagacagcctagacaccgaccaaatcactattccaggctttgctgtcttctccattcggagggacgatgacgggcgtgtaaagtgctaccgggcagagacattcctggaaccatcggcattgtttcaacgaatggctgaaaaatcaagccaaccttagaatattcgtggtaggcatattggtggttgaggtgatagacttgatatctagaccattactgcatgtatccatgtttgcatggtttgttgttctgatatatatttctaccatacaccaatgatctatttacaaatatgccaactcgtctgattgatctataaccaataactctgctttgtccacaattttaaaaaacgatgctattcccagatcaccccaccaattcatctgatctctgtacatatatcctcaaggaagtttcatttgatatagtcctcggcatgtcagattttaatttccttacttagttatgtggtttagcgtagtaatttttaatgccaaagactttcgtctttgtagaatttacccgctggccttgaatatgcatatgccgtgatgatatgggacccaagttttgctattttgttgagatgctaggtcttctactacttgctgctgaatgctgctgaatgctgcccaaacaggtgacggattcaagtcataagctaccttaattccaatatagtaaaaagatagatgaagtgctagagctgtaaaaatgcgaatcatctttaagtatgacaatgcagagggttctacctactgctctataactaccctatgactttacaatcctcttctactggtaagctcatacatacgaccatagggtgtggaaaacagggcttcccgtccgctcagccgtacttaagccacacgccggtgagttagtagttgggtgggtgaccaccagcgaatcctcactgttgtatgtttttgtttttgtttttgtttactcagtatagcaataatagcatgttcattttaggctccgttgtggaactctatacaacatacggagttcccgtcgcaaatgaatgtcaaagctgagtggagaatgagaagaaaaaaaaataacgtattcggtaagcgagctgcgcaccccaaccaacccattgacagttggaccactgggccttaaggtagatcacaaaaattgggagttccgagtgccgttgcgaagaacagcctggggtgatcattcaagcggccactcaccatacctatgcgccactacatttttatagacataatctcattcctcattccaaagccccgtcaccaatgaagcttctttgtcacactcccaatatacataaaaacccattctttggcgtgtgtatttcattctctaagtgagcgtacgctgcccacgtgatgttgacaacacacgcaggtaggaaaagaggattgaatgattggcgtcgggttctcacatgggcattagagctctacttggccaagacgatgtggccaatgctagggatggatcacatagggtgaagtcgaagaaataaacgcaattcgaataaaagatccggtgagacagttgtgacagtctccatcggatagcttatgtgccatacttaggcactttctcggtgcctcctcgtccatactccggggctgcctagcagtgattcccaacaactccttgcatccgttgcattgttatatcgtggcttggttccctaatgactgcaagtatttcgtcctgtcacaagtaccccatcgacgatctcatacataagcctggtaaccaaatgaacagtcactaccagccagcgccctccacttcccaaccccgctaacccctgaatgacccctcgaacccccaagtgctgaaaaaaatcgatcccgcaatcctaagtcaccatacttgggaccagaggagttcatttggccggagtgattgggcaatttgcgggaaggtcttatgcaaggagtgatgggttaatactcatattgatgattattgaggttcacgctgctaggagcggcaaaggaagtgcctagaaactgggtgtaaagttctgtctcagtggtatactctcagtacagccatgtaagggaggtgcaacgttacaacaacaaattctaacgagaaggataagatctgtgccgaggaatgtaacatcctgattatatatataaatattgatgattagtccgtgagttttctactacaaacaaagcatgacgatcaaacaggaagcgcaagtggtgctagcggaccctgctctgcttgaaaaaattgacaaattattcgcctgcaatgtgggagaatacatcaacctaccacaattggtcgttgtcggagatcaatcgagcggaaaaagctccgtcttagagggcttgacaaaattgaaattcccccggaacagtggtctgtgtactcgatttgcgacgcagatcatatttcgcagagatcctaacttgaaagcgcggataatcactggttccatcatctcggcaggacacgagaatggaaatgcaaatgctagttggagcagatctgaaattgagtcattgaatgagaacgaattcgagattatgatggctgaggtgggtcgatattctccctgaacataacagtcaatgaaaaaaagttaagcttctctcaaggttcatgtggcgatgggcctatcagcgtcaatggaggacgaactgcctacattttctgccgacgttcttcggttgaagataattggacctcatgaggatcatcttagtgtcattgatgttcctgggattttcaaaacgacaacacctggcttgacttcaaagtcagatatcgccgttgtgagggacatggtgctcaactacatgcgcaatcctcgatcaataatgcttgccgttgttccagccaatgtggaccttgcaacacaagagataatcgaaatctcgagagagctagacccgaatggaacgagaaccttacggatccttacaaagccagaccttgtcgataaaggtacagaagacaagatcattgaacttgtcgaagggaagcaagagtctcaagaattaggctgggtggtagttcgaaaccttggtcagaaggacctccaggactcttcaaagatccgtgatgtcgaagaagagatattccgcaattcgcctccttggaaccgtatctcaaacgataattacggtatcgaggctttgagaacgcggttgcaagcattattggcttctaacgtgcggcgagagtttccgtcggttagttcttctgaagtactggcatacaacgtctgatccgtgaatgagtgataggtacgatctgaagtctcgaaacgtctcaaagaatgcaaaagaagccttgcaaacctcggagaagagcgtgaatcccccgagcaacagagcaaatatctgctcgaaatcgtgtcaaagtttcagcgtatcactgaggatgctctccatacaaactatggatcgcaagatgcttttgacgacgaagctgatttacgattggcaactctagttgccaatcgtaatgcacagtttcctgatgacttttcttctcgcggccatgtatactgcttcaactcgcatggccatgacgatgactctgaaaatcaatcaagcaccactgcgacctctgcctgcgttggcatagactttcacgaagtcgaagaggaacgggagaactttgtccccaacagaaagctcaataattgcagcgatatcgaagacattcttcatgaccctgttcaaatccaaaattctctggaaaagggtattctcccttggatcgaaaagctctatcaggaatcccggggctttgagttgggaacattcaattcggccatcctttcaaccgtgctgaagaaacaatctgccagatggcccattctggcggaaggctacatttgtgatgtcatatctatggttcacatttttacgcgtaaggcattgaatatatcctgtggagatcagaggcttagtcaaaacatcctctcatttctgatggaagacctcactgagaaatatcaacaagccctttcaatgacggattttctccttcgaattgaaagggaaggaactccaatgaccctaaatcattacctaaatagcaatttgcaaaaatggtgagattcaatgcccattatcaattataaatcgctaatctctttttagtcgccaggaacgcatcacaactgcagcccggggggtatcagtagccgccaaatctgaggaccagcctagaaaccactatgttcggctttctgaccttaagcaaatttaccacatgagtaatttgcaacaaactgtgcaagacatccatgatatcttgaagtcgtactacaaggtcgctcgaaagaggttcacggacaatatgtgtatgcaagcggcagactaccatttggtaaccgggcctgcagcgcctatgaaactcttctccccttcctgggtctataacctttcacacgaacaattggaacagattgctggggaggaaatatcggtccggaggaagcgtcgtcagttacaaaagcaggtgaaggagctggaaactggtcgaaagattttacattaacgtgagtagagtaagttgaaatacagtctatatactagaaaactcaataagaatcagagaaggacgagacagtacagcgggtggggtaagctagggcttaatgtggcgccagattcgtggaaataaaccagctctaacactaaatcaaaagaaccgttgaatatgtagggcggaatttaaagaaaggtcgtgtagctagactcttagccttccaagtatatccatctccggttgatgtacgaggtgacgacaaagatgtcggaatacatgggaaaatattaatcaatagaacatcaacttcatcaatagtaacacatcaaagggactagttaggcatgctatttctaccatgtctgcgtattatgcaaacgtttgattcgcagatcctcaccgccatttgtgacagagccattttctgtagcctctttgtagtcattgctgtgagctccctctgttaggagaatgatgcgatccgagataatcttgtagagcggatgctctgttgttaacctcttttctgtcgcttctaacacgacttggtaggcattgattgccttggcttgctcctgttttttctcccataccttgcccaaactccacattacggtagcgtagtcggggtgctcgctaccttgaaaaatcttcatcttctcgatggtcgtgataatcagtttcacagcttcgtccaggcgaccctgacgagaataagttcgagcaagttccctgcagcccatcaaaaccccaaggtgatcttcactaagacttcgtttaccagcagcgatgccctcgatgagaatatcctcggatttttgcaactctcccatttcagtgtatatcttcgctaggtagcatagcgcctagagagtgtaggggtgctctttgcctatctgggccctacggccgttatagacttcctttatcaaggatattgcgtcatcaagctcttttagatcatatagggccatcgctagattgttcttcgtttcaaggacccttaagtcactctcctctagactttgtattcgaatttccagaaccctctgatgtatgtctctactctctctaaaccggtgctaagagcctaatgtgacacctaagtgatcaagcgctttaagtgtgtcgtcatctccctcgccaaggtatgcctgcattttctcggcagtttattgctgaagttgaagagctttataatattgtctattgagccagaaatagtgactaagggagtccatagctagtagagttttacgataatctggtcctaagaatctctgttgcgactcgacaacctgttcttgtaaggctatggcttcttttaagtgccctagatcccaaagtatactggccaatcctaatattgtgtttattatctttgcgtcgttcgggcctaaaagcgtaaccagcgactcctttgccagaaaaaggtaatatacggacttcgagaaatcacctttctcggcgtgtagaatcccacactttgcagcgttttgaatcatctcttgaattgagaacagtaaagtgggctggaatagtaacgtaaatcgacggtattttccaatgtgtagcctagagaattctctaaactctatcggataggcctctagacattcgttaaggtgaggaattagactcctccgaaaaatagtgtgggactcccccgtttccatcggagggagtggtatggaggccatgagtgtatgaaaggaaattattgcccagaggctcttctccatagggggtatgcggtctcttgcccaagcatggaccaaaggatgtaatgagaaactctgttcgtcattttcatatgttattaatgaggacgaatacaactcgcgaagagcctctctgatgtacaatggatgcatatcatccgcgctttgcttgagtattcggggaagtgcccgaggtggtctgaagcgactgataatagcttgtacaaatccttcccgaaggggtctggttagatattgacgcaactggcttcgcttaaggctcatgcctctttcgaagatattaactcgtatattatcaaagtgatagaagcttacaatgttgaggatctctactgtatcttgacttgggatcgtattattggatacgatgtgttggaatgaaaaatcaaacgcggaatagatatcattattctcgactttcccaccgataatatcttcggtgtttgaaacggattttcttctctggcgattttttaagaagcgtctgtaaaacccgaggtactcacttaagttatatattttgttgtaaattgagttgcctgcctgaatgactgtaagggctaaatatcccagtgtcttgataatctcgtttgctgccgtttccgaggataaatcccatggcggtataatatctacaactttcatgagaaggtggagagcatctctttgcttgagacctttgacctccatactcccgacgttaccttgcctttgaagactgggatttcttgtagttacgaggatatgacctctttctctaggcacaatgaagttttcgaactttaggtcaggcttgtccgcgttgtcgattatgagcagccaattctttcgagcttgggaaagaaagtgtttaccggagacttcggtggcttcgagaccccccatacgtccgactttacagaataattctttcgcggtttgggccgaagttgcatcgatagtgaagattgcctaataactgaacaaagaatatgtcagtgagcgagattcgatatttaggtgctcgaatacttactgttgtcggttgctttgggcatattttgcagatatttgtgtcttcccagatcccccaattccatagacgacaaatcgcttttgctgtttatccatcaatgtctggtcttctggttcaaaggcaccctggagtgcattcatgatgtcctcctgacctataaaatccatggaaacggtgtatggtgggtggaaatgttcattctgcaaagcggcttcgatagcttcagtattgctttccgtggggatcgggactttatccggaatttcaagaaacaggcccgttaattcacaggcttcgtttcttcgcatccgcatcattgatcccattgcctctttccatcgatatgtgacaattgctggagccgagtagcagtacttcatcagggcagatataactgtccgataggcagagtcagattggtgaaacttcgtcatatctgagtggttggagttcggaattccacatctttctgtatcatacagatgtggagcggcagaggacgggtctaccataaactccgcgccgctcgtaagctgtgttctcagcccctcccaaaaaaggtacatgtggacctccttcatgagtggagcgaactgatttgtgatgatgtctaaggcatgcacagtgattggcatttcaggcatgctaattctctccttcgctcggcgagttaagaagttcgatgtcgatgacgatgtacttgaagcaatccatttcccaacatcgatctgatcatggggggtgctgaagaacaagatggcaaaagtcgagatatatatagcattgaggtgtgatgtgaaatgggatgttcgactcgctgaatgaacgagcgcactcttcacgatgatgcctccaagtctgccactagggtagttgcttgactctgaactctgtccatggagtcttttccagtataaagggaagggcttgcgtcataatcaaatgtgagaactcgtgcgttatggatactccgtggcagaaggtctctcagccacaaagtacccgtttcatgatgtgtccatgtctctaacgagtttttccccaagccatggaccgcgacgatactatagaatcctttgttagcgatgtaatacgcccaaccccatagagacgattaggacttctcactcaacaccagcattctgatccaaatctgccgcacgatggctaatgttgtgcgaatgaagtacatgaaggcctaatggcatcgcgcaaggttagatttctgatcgctgtttacagagagacatgtattgacatagcgatgataaggagctggactcctaagcacgtgcgggagttcatgatgggggaattgagaacacccgggcaaacgcatggaatgtattctgaggcatatgcacgatcgacccatcaaggttgtgatctgcgtgattctgagcctatcgaaaaggggatttaccgttttctccgcccttgtcttattctcgtgtaatataaactgcattagtgcttacagtgcatttcgcctatgaattgggcgctaacagccacctatattggaggtactatatacaaaacttcttcccagccccccaagaccttcgaaatcataacaagaattaagaaaatatgattgagaagtatctgatctgggctgtcgttacgtttatcatttgccaaatatgctatcgctcttttgcaaaattcaggagctatcgggtatgtgagaatgttgacattttgagttccattgctgatgatttgccggcgtgattctatttggggatcccaaaagggctgcgaattaccactcgaacttccaaagagatggccatttggaattgatcgcatcaaggatctctgggaaacaaacgcagaaggtcgactccttgcatatctttgcaaaatagcagaagattatgagccccagaacaacctcactcaatatctgctgtttggacccagagcctttcacgtgttacatcccaagaaccttgaggtcgttttgtctaagaacttcaaagctgactatcctccatattctgcttttcaaataaaagcataggctcgttcgctcactggtgttttttttttttatcagattatgggttcggagtcaggccccaaattttcgcgcccctgcttgggaatggcattttcactcaggaggggtttgaatggcagcattcgagagaacttctgcataaacaattcaagaatgtccaatctcagaacttcgaccagttccgcgaacatgtcgacaatctaatcgatcgtctaccctcaagtggaggtgttgatctccagcctcccttctttgatttgaccatggacatcgcaacggctctcctttttggtagatcggtctacactttgagggctggtattgaccagtatcaacataataaactctttgcagaaagcttcaacatcgcgcaagagggccttgccaagcgcttcaccttggcataatctctatagctcagaagccttccggaaagcatgcgctaatgtccaccgctttgtcgaagaatacattacggagtttgatttggagaccgtggacagcaatcaagagaaccgatatggcttcatcaaacagattgctaaggagtcgtatttggggaccgcggaaaacaacaacgagaagcgggctgggcccaacaaacaggctattgatgagtccgaaaggatgaaaaatatacgtgatcagctactggatgttttgctcgctggaagagatacaacggcgctgtttatcttggacattgtatgtatcacacggtcagagatatcttccaggctttccgctcgtgctgaccatattatgctgttggtaagtcgactacttgtccgtcatacgagtgtcatggaacgtctgcgaaaagagatctcttctgtcatggggaccgagtccataccaagtcgggaacagataaaaaagatccgatatcttgattctgtgatcaaagaaagtgagtcccaattgtctgtatttttggtgaaacaggtagacatctaattttttccgttaggcctgcgtctatatccccctgttccactgaacaatcgcgaagcagtggaaaccactattctaccaacaggtggtgggccaaacggtgataaacccatcttagtgaaaaagggtgaacttgttgtttattcacagtacgtgaattcaagggaaaaaaatatatacggccctgatacatatgaatttcgtcctgagcgatgggaaaccggcgaacttgacaatattggctgggcctactttcctttcagccgcgggccccgtcaatgcttgggggaggaatttgctcggatggaaatctcttacacaatcgtgaggatgctacagacattcccgcagattatgttgccatcgggagagccaaatcagcctgtcggaaccgaaagacagcgactaacattagttctctcgagtgctgaaggatgcagagtggaagtccttaaaagatagtcattgggaatggggctcatagagaatggatcgtatatgggcggctatggaaggaagagagatttacatagtaaggaggcaggttcttgtagacagccacccacctcaagaatcatgtatcgcgatatgtagtacaaagcgaagtgtttcaccaatcatttttcattccactagtgtgtacgctaatgcagtacaaattgggtcacactggcgagatgtccaataaaaggccaatggtaagttccctccctcatgaggggtctgaataataccaaaattgcacttcaacctaccttgaccaactctcaacaacattattactccacattcgacactcaacttgaaaatccatgacaatgagtcgaaacaaagaatttcctaagcaaatttacgggatccaagagttatatcgatcgtgtggggagccagttgaggttgagtgagtgcttagttatcattgaaatgatggatctcgttgacaataactagcattgttgccgtccatgggctcaatggccatgcgacagggtcatggacatccaagccgcaagaaatatgttggctgagcaacgcatctttcctcccgagatacatcccccgtgcccgggttttagtatggggctataatgcgagcatcttctcacagaacggaaaggcacccagcgcagacagggttttacaacatgcgcagacattagtctctcaactagaggctgatagggatgtagggaactgtccgagtctatatgaatgaagccctgctgacggttttagctcgaagatgcagcgaaaaggcccatcatttttgtatgccattccctaggcggcataatcgtgaaaagagtaagttgtttaggattgcatacaaggaagttgtaaagaccaatattgttcccttggctaaccatgaataggccttggcgtatgcagagagtcgcgttagactcactcacatatattcaatttacgtttgtacatttgctatcctcttcttcggcactccgcatcaaggatccagcaaagcgaatattcttagtagtcttcaaaagattgtatcgattgcaacccccaaagccgctatagaccttgaatcaggattggtcaatgcactcgagaaggaatctgaagtcctgcaaaacatcaccgaccaatttacaccgctcatgtccaacttccgcgtctttttcttctgggagcaagagaagactgatctcaaataaaaaagagattacatcgtcactgaggcgagtgcagctccaataagactcatcctttgcgaacctttacacaatacgtctggtctatggtatgtgtgcacgcaggcaagttgttgccgtttgtcttcaagttgtgtactactgttataatgcttgagtggtgatgaatatttcctaaattcatatgttcttgcttctttccccgttctcacattaccgaatcttgagagataccatacatctgtagatactgttgacgaaattcgtgtagcgtaatttacactagactataaaaagaacgaaggttcttgcttagggcctagaggggccatatcccattcttgacagctgttatactcaatcggtttaaccaggtgaaaccccaacctcggggacagctcgagtacctgttgcgggatatggcatttaatttgaagacatatctctcttcagtacatagtactagacccagaccacatagggtacagagtccagacactaggtatgcaattgaaactttcagactttaaataagcctacgctaaagtatctacggcccgggccgtgacggaaggcttgcagggttatttgtatgtactatagtgtacattattatcattattattattattattattattattacacttggatatcaatggaaattcctgggtttccgatcggatgggggttatagaccaataaataggacaaaaatagcaaaaagcaaaaacatacaacagtgaggattcgctggtggtcacccacccaactactaactcaccggcgtgtggcttaagtacggctgagcggacgggaagccctgttttccacaccctatggtcgtatgtgctagacatacaactagagagaaatatataatgcatgtagtttatgagagggtcctgcaaattgttggcatacaacattgtatgttgtagtcgaaaatcacgactggcacagtcgtctaacctaattaggataggtcgatcttggcactgttatttcattactccgtacactccggataacatcagccacataacgagtacttccttaatgatctcggcggcctaagagcgaagggactgattctaacttctaatgctgcgcaaagccccctcttactggcttattggctttttgcatttgataatgactcatttcacaacaaacttccggcatcatccatcgcgcaacctatggagtttgcgtttggaagtccatcacatcggcaacccatgacggcaagccgcctaatgcagctgagacttgcccgccttcttacttgtggcgagagcaccggccaggccaaattgagaagagacaccgttaatacgatgagttgagttcaggttcttgactacaaccatctggtaacaggtggccatgccttcccgagaggcgataacggaccaggagaggaacagctcccagatctagggcatgttagacttcatggaaagtactatggtagacgggggaaaccttactctataccatctggggccatatttggccttgattgcgtccacatttccagtccagttccggtaccatctccagagggtaccggagtaatgaacaccgacagtatcaatgctggtcattgtcagtaagtgcacttgcgaggacagtcctagagcccaagtaaaactcaccccttgagttcgaatccagcttgttccagacacttgacatagtaccacagaggagttgaagcatctgcgccacggaagatgtacttgttcaaatacagaccccaaatgaaatcttcgtactgccacgcctgacgcagacctgaaagctgaacatacatagcaccgtcgtcattgagcatatcataacactggcggaagaacgtggtaagcttccggataccaacgtgctcgcccatttccaactgcgtgatcttgtcatattttgtccgtggaatatcgcggtagtcgaggcagagaatacgactctgttgttcaggaatccccgccttgcggagagcgtcgttgccccaagcggtttgattctccgcgatagtaagtccggtaactttagcgccgtagttgagactggcaaatttagcgaaggttccccagccgcagccaatatctagcatggtctcgccttccttgaggccaatcttctcgcagacgatggccatcttgttatcttgcatttcttcgagggtctcctccttctccgggtctgagatgatgccggaggtatagatcatgcgagggccaagaaaccaagcatagtggtcgttaccgcgatcatagttgggacggatctgttcctcatcttgggctttggtgtggaagatgatgtccttgaaaaaggtgaaaaagatgaacttgaagaggtccaaggtaaaagagaagttcgcccagtcgtgacggtattccatgacctcaagtgcgtcgccgttgaaatccaccaagccgtccaggtacatttccgcaaatcgctggaggggaactttgttctttccgtgccatttcgctttatccgcttcgcgcttgaaggtcaagtaatattcaatgggtcggccgggtagcttgactttttcgttggtgcgggggctgctgctggatttccaggaccagaatacaaccaaaagaggaaggaagagaaggattaaaaggaagaagaatgtcttctgacctccattgagcaggtaggtaagaattgtaggaattccgacgaggacgccgcctaggagaaggttcgagaagctttcatttccggggccatccgcgggcagcggcgcattgtgaatggctgggaactatttggagagattagccaggttgaaggcaggagggaggtcaatggcatgaacacacgtttgtcagaccaattccacagtcctctccggtctggagcttcgcaggtttggctgcaggggtcttaatgaagtcgatgtcgccagacagctcgacttcgttgactcctttagcactcattgtcgattgttctcctatatgcacaatcgaggatggggaacgagaaaccatgtattaatcaaagagaagacgggaggggatatggacatcgtgttcgagggtattatagacctgataaacgcggtaatcgataagagttagggttccacatgtgggtcatcggtccccgcgggccccgttagtgtacacgttgcaggcactctcaggttcaagtctcacattccaaatgggcttgctttgtcaacaagcggactgctctcaaagacttattggaccaacttgtgaatttcaatcaaggcatagagaccgaagaggaagcccagtctgatgggttttggatctccacgacttttgtccaggtgcttcgcccgcccatggaagtttgatcctccatctattccaggtcgcagtctttaccccttgccccgaattgtgacaagtctatcgcgtttaagtgtcttcgtagcttttttgcttttcgccgaaagaattattgcaatgcctaagttgatcccacgacggcgcatggtagttgctaatccatatggcccgaatacacgcccactcgggtcattccaaagctgcccaagatgcaaagcagcctgcaagcagtgctgcatgtgaaatctgttggaccgcaggccatctaggagtgactgtcgttgttcagttcgcaacatgcaggagcctgcaataaccagaggaccctggaatatagcctcataaggtgatctagtggcctgctctgcgtatagcatgacattgtcgatatgcttctgtactttcgccaatgttacagtgtcatttaatgcatctgggaccattgcggtcctgagatagaggagggtagcctcccggcagagattgagtgctgtatcccgttgcggctgcgatttctgaccattgactgcagaatctggaggtttatattctgttattcgggcgtagagtgctaggtgcatctctaagctcgcctgtgaaggggttttctctgtgagacgtcgggcggcaagaactgctatgtcgggcagaatttcgaataagccatctgtgtcgccgaagacgactccccatgtgtcgaaatggtccattgtgccgaggatgccgtcgacgaatgtgtcttgaagcacggttcggcgattgatagagccgtaggggacgatattgttactgagaattaaaaaggatatatctccaacacaaatgcaaacaggcgtccgttgtcattgatgcttgacggtaacgagctgttggctaattggataatgatttggcggcttgcgcggaggtggctgaatattgccccttggtcgtctccagatagcgtctagacattgcattagtgagccttttgtggacgcgaggcctaagaccatgtgtttacctcgaagaacgttagtatcatcagtgtcaacaacattcggagtgcctggggtacatcgaatgctgtctggtctgaaatacgatcccgaattgtccttatcacgaccgagtaatgtctgtatatcgcgagagatacttcgagcccagggtttcgggacttcatatgggccccactaagtgctagcaatgaatgcatgagcagctcatcattgcggcacagaggtacaagtagagtcaccgacgggttattgccgtctggagaaaaggaagacagaacgttggccgtttcagttatgtaatgtgtaaagagaaggtttgatgcctgtgtaagcgttgaagctttcgttggagacacggacgaagctgtgagactcgaccattgagccgatgggtctctgggtgatgggtcgagccggtctggactattcttataaccttgtgatgcagcttggactatcaatttctgagactttgagcgcggaccaacaaccggccaggcacattgtaagctgtttcgtgtgcatccaacgcattttggttttctctcatcgcattttttcttgcgctggcgagatgtgagacaccctgtcacggagcggaaccggtgttgtttggcaggggcttggctcgtccggggtgtcgtgggctctgcgcctgtcgaaaatggcgccagcatgttgtacacgccatatgcccttgcaaagcgggattttgggctaagctggtctagaacacaagggttgagagaggcaagaagtcggctggatcgaagtctgtgtcgatctgggcgtgcggcttgaggccccaactcaatccagctcctcttttgtggcgccttcttatctgtaggggctcatgtggataacccaatatcaattcacactccagttcggcgccagcggagcggggaactcatgtatagaccgctttcgacaccgctctataccgtgcactgtaaattgaagctattcctatagaccatacaaatcatcagctgggcgtcaagaaccacctccgaccgcacaaaatgggaaatatgtatggtgggaatagcttcaatttttggactgagttccaaggttagacactttgctttttaagcccgctgtcatgataattcaggttattttgatttctgctagtctataattcaggcatgctcagtaattaggcctgaaaaacctggcattcgatcttacaattttgcccgccgcacccccctttccatattcctccacttatatacaaatttacggaatgccgctcgaaacaagacaagatcatcatgtgtggatgctagccactcttgccaactggtactgggaatgcttcgagaacaactgaacggtactaaccagcttgtccaacaggaactcaacgctgcgttgatccatggtctcctcagtagctgtgaccataagctcaagctgagatccgtgctccacagaaatgatacccagctgaccgtgcgccagcttggagctggcccagtcgcaaccagacgacgagcgaacaccgcccatctcgaagggctccgcagattcttcgctctggtggtgcacaagacaagccatttttgagccaggttgccactctgtgcaaaattctgcgattgcgtcaaacgatgcctcgtcatgggtagtgattgctaactgctgtacctggacgtgatgcaagaaatcctccaccgtccagtcaggttcaattctgattcgaacgggcagatgattcaagcagggtccaatggccgtattcgcgcccaaggaacttccacgcccgtgcacaacctgacctaaaatgatatcagatcgcgcagtttcctcaaagaggacccatgagagagctgctttcacgagcgttgacacggtcatgtccggtgcgagagagggcattgccacttggcgcctctcgactatgtcattgcctgagattcttgccttcccagtttgatcaagggggtcaagggcagcggacggagcaccttgaagatatcgttgccagaatgaaatctcggctttgttcagatcgcccattcgcctataagcgacatccttgaattgtgcagccggtgtgagaggctcattctgataggcttttttgattgtctcccacagcaacggtatggaggcaccatcatactgcgcatgagatatgcgaagaatcaaggcagagcactgtttgatgccactagtcacgagagtgaagctgactggcattataccctgggctgtagagggtggatccctttgctcagactctcgagcaacatatgcctctggatcatcacattgaacaacatttagcacaggctcaacttcccggaggatcacctggaagaaccggccattggcctctatgaataccgtgcgtaggatgctgtggtgagtcacaacctgcctgcacgtgctctccagtctatcgatttccagggctgctgggaacacttgtgcgatcgagactggcgatgaatgggttatgtaaaaaacttggaatgggagcgctgggatgatgtcttccacattatctttgaccaacgaaggtcccgctgcggagtgccaagcaaaaagttctgcatgctcgtcatctgtaatcagagaatagggtatatggtgctgcgaggaagaagctgcagtctgtatcccatctatgatatcgctggggttcaagatggtagcatgctcgacaacgcgcattatagttttccactggaacaaactctccactgaatgctcaatcccggctgcccgagcccttgatgcggctttgagagccgagatcgaatcaccccccaattggaagaagctgtcctcagcaccaatatcatcggctgaaataccgagtattttcgcccagatgtgctgcaattcccgctgcgttcccatggtgggcattcgcttatctgaaggagcttcagcgaacaatgactccagctgaacacgcgttgcgctcgccgctgagtctctcaaccgctttcggtccactttgccactagcggtatgaggtatccgtcgaagcggcacgaaggcagacggtaccatataatctggaaggatgtcgcccagttggcgtctgacactagatatctgggccgtaaagttggtcggggcaacaatatctaaggaagcgatagacgaaatcgataccggtgacgccatctcagccgatttcgaagcgacaaagacaaccaaacatttggaattcatcgaagccatcggagtcacaatctccgccacgatgtccgtcagatcttcgggccaaatctcctgcagtcgcttctcaacttctgcaagctcaaagcgttgacctcgtagcttgacctggaggtcctttcgtcctacaaacgagagagatccgtctttttcataacggacaaggtctccagttcgatacacccggccaccactagtgaggccaagacgttgcatccatgttggacatgagataaagtttgtagctgtttggtccggactgttcagatatccgcgacccaccagaggcccttgaagaagaagctcgcccacagcaccaataggagcgactcggtggggattccgtgggtcggtcacccagcaggcacctgcaatcgggaaaccgatatttccgccttgcgagttaaagtcaattggggactgcacagtaaacacgaccgtgcattctgctggaccgtaaacgggcacgaggcgtgcaaatggcacccactgctggatgtcacttgaccgaaggggttctccaccaagcatgatcgttcggagtgatcccaactcatttggtgtcattgcgcgcaatacactgggggttaaatgagcatgagatggttgtagccctttcaacgcctcggtcagtcggcctctccgctcagcctctgtcaggacgcagatgcaagcacccgcaagcaatggaccgagtatctccaaaatactgacgtcgaaagcataggaggagaagttaagcacgcgggaacctgggccaatatccatcagacgagaaacttccctggtcattgtcataaaagaaccatcctcaatcacaacacccttgggtttaccggttgagccagatgtgaaaaccgcataaagagcacgatcggtaccaaaacgggtcgtctcacgatctggcatcgatgcgcactctgagtcgatgctctgaggcatgatgacgacattgtggaacagcgcctcagcttcctgaagatgctctggcgatgtaagtatgaaaggaggctttacctcctcgcagatattccgaagccgctcttgtggatgcgaggtgtcaagaaggacgaaagctgcccctgccttgagcacggccaacaccgctaccacagtccagcaggaccgatccaagtatattggaacaaagacctctgatgaggctccctgcaaacgcagaaggccagcgatgttgctcgaaagaaggtctagttccttataggataggctgaggttggaagacgagacggctatgcgcaatggttgcctctcacaatgctgggaaatcacatcagtgaccgataacggacatcgtgacgggaatccaatgttccaggcttgcagctgctggatacctttgtcattcagtgtagcaatttcgtgcaccagtcttcctggatgatggtgcacctgctgcaagatgtggctgaattgatctagcatatgttccacttgccatggtggagtgacacgctcatcagtggacatggcaacagtcaccagatttggcttgagcataacggctagctggatggcatatgtatttgacgcagcatccccggacgatgttcccatgggctccatgggatcattggcggtgcccaagttttcaacctctcctctcccctccacaagaagggtttggaacgaacaggcctgcttggcctccgttcctatggcagcaatctcagacagcccaacttgctcgaatggaatgagctgtactgtgcgctcctgcagatctcttagggcatgtgagacggtcgcattatcatcgatttgcacgcgcaaaggaagcgtggcaattgtcggaccggccatgccctcaattccattcacagatgctgctcggccaggagacacaatgccaaataccacatcgtcattactctggtaatgggactgaacaagagcccacgcgaaacgaatggcggtggttcgactgacacattcatccatcactgggccggtctcaattgttcgtaccgtctgctttgaagcttgaggccggtatgatgcggacggaagtgcgggaaatcgctcggccgtcagtccatggaattcgcgacgccagtgttcgagcgcgtctttctgttgggacatggaatatttgataaattctttgaatggagtcatgtcggagggtgataatgcctggccctgataggcctgttgtgcacgatgcacaagcagaggcagtgaccaagagtcatacagagcatgatgaatggtgataatcaggtccagtcgctgagccatattggaatcatcgctcatgactgggacgacttcaaactgcaccagtggctgacctagaagaacgttccagttcaactttttgtgttcctccatgccccccgagatccagtgaagctcgctgttctgtaccaggacctgcatgaagccaaactccgactgaatgaatcgcgtacgcagaattccgttgtgttctgctacggtctgccaagcggtcttcaataaagacagatcaatacctggccctaaacggaagcgatggtatgcgatatatgacccgggacgctccgctgtcaaagctaccataccggcctgcaatgcggtacaggggtatacgtccgcgatttgctcaatcggaagactgcattgttccattgcctgcgatttcaattcttcccggttatttgcggggagtattgagaatggaggcacaggatcatccaattcctttggtttggagtttggccgttcctttggccccggaagcgcgcaattcagtgcgaggtcgctaagcttggggtgcaggaagatatccgagacacctagttgaatgccttgatcgctagctgtggcagccagcctcattgctgcgatcgagtctccacccaagcggaagaagttgtcgtcgggtccgactgtctccgcagggcgagccagcacttcagcccagcaagtttgcaatgcaagttcgccctttgtcatttctctcaactgtcgtaggtggtgactggtcgccttttggccaatctgggatcgtagcgcttgggatgctgcgtgtcgcagttcttttcggtcaatctttccattcaccaatcgtggtacctggtaaacaggaatgaatgccgatggaataagagaagctgggacatctgcccgaagacgtgattgcatctgctccacggccgcctcgaaggcttgaacatcgccactgtcttctggttgaacaatagaagctaccaagtgtgcatctttgggaccatttagtgcgatcaaatctgcaaagacttcggggtcgttggtagggaagcactgctgaacatggtgctcaacctcagcaagttcaatacgctgtccacgcagcttgacttggcggtctttccgtcccatgtattgtatagatccatccacaagacgtctcacaaggtcacccgttcgatacaagacgccttttctggacgcacggatgttggataaccaaatgggatatgggacaaatgccgctgccatagcctccggacgattaacgtaaccgcgaccgacaataggaccatcgatgagtaattctccgacagcacccacaggcacgagcttctctggcttgtttggatgggccacccatgcgacacaaccagcagggtatccaatgtttgattcatcctgtgagaggtattgcggtgaaggctgggccgcggcaatgacagagcattccgaaggaccgtaggcattcatcaagcgtacatgcgatgaccagcgacgaacatcgtccttcgtcatgccctctccaccaagcacaagtgtttccaaggtcgaaacatgctgcggatttagaatgcgtgccacagaaggggtcagtaacgcccaattcacttgcatctcgcggattgtatggcccagtctctgatttcggtctgtatcggagggaatgcagatacagccgccgaccaaaagcgtgtcgatcatttccacaatgctggcatcaaaagcgtaggaggcaaattggatgacccgggcgtttctatcaagacgaagtacctgggtatgtgcggccgatgctgacaggaatgactggtgctcgatgacgcttgcctttggcctacccgttgatccagacgtgaaaacagcatatgcggcggactttggattggtcgccgatgggataatgtcttttcgaatccccgaatgagacttttggctgagttcctccacgatgatgggatttggcgccagattggctgcaagttcaaggtacctcgatgaggtgatgattactggacactggaagtccacttgcaccatctcttgcagtctctctgctggatgcgatgggtcaagcaagatgaatgctccacctgccttcatgatagcgattatggcaacaattgtccatcgggatctctcacggcatacaggcacaaatacctcggggccgacaccaagcagtaccaggtccgtagccaatagtgatgataggaagtcgagggtctcatatgtgaactgaccatcccaggaatcgactgcaggggatgagggttgcgccgtcgtcattcgttgtatgtcagtgtgaatacaagatcgcacagtttgcggtaggttgtaattgaaacgaagcatttgactctgattcttccccattgataagttgatgtcgcttaggtttatgatcgtgggatcaattagctgctggacgatgtgacaaaaggtgtcggccaccaattcagcctgggcttcagccacagcgtgcgtccagtatgtcaaatcacaatcgatggtcttttcacgcgaggtgatattgatcgtgaggtcatactgtgtttttgtgagttacttcgttctgaatgaaagtttttgggggttagacagtatcctcacatacctcagttgaatcaatcccatcttccggttgcaatttaatcttttcagacttatcagtaaataaatttccggcgtccttttgtaatgacatcgcggtattgaacaaaggttgaccggagcgcctcaaagaatgcatgacctctgccaaagagcaatgttggtgatcgagactttgggcataggccgcatgattttcggcaagcgttgagagaactgatgaatcatcagccaaagataggcgacaaatcaacaaattgattaaaggtccagagatgtcgtgcgcatcttggactggtatatcacgacaagcattcagatacccgaagcatacagactcgcttcctgtgtatgcacgaagaacaacaccccaagcgacctgaagcaaactggaaatggtgataccgtgatcccggcagaatgaggagagatcttgtccaatactcatggagaatggcaacgatttcagaaagcttggggcggttgcatgctctttcagtccaagagatggaaaaacacatgggtgaacatcagtcaggtattccttccaatatgattccgaggccctatggtcccgagtcttcagataactcaggtacctgctatagctgcccgcagactcggcgtctagtgtcccattgcatgcttggtggaattcagacagtagtctttgctcagtgataccgtcaacaagaatgtggtgaatagccagctggcagtaagccccaccatcaggctcaattgcgaccgtgagctgatgtggtgggcgacccttcgtgtttgatgattttggattcaacaagaactcatccgaaagagacggaacttggccctccgcgcgcaattccgatcccgacaataccttgatgtttgcctcacaagtcctcagaactacctggacaggatgaccgtgccctttaacaccatcggcgaagacagtgcgcaagatgggttgacgatcaacaacctgctgccatgcttgctttacttgattggtatcgagtgaggagttggctgacgttgggtgcagagaccaccggatgtgcgaccagtatacttgagggtttcttaattggctcaaccacatgccgagttgaatgggcgagcaagggaacatatcttcgattccagacggagatacatcaaatcggcctgagacttgatggagtaggctgtgaaggtgctcttcgcttgcaagtgatagcaacggaaaatcgacagcggcgagttgctgttcctgctgcagctccatggggagttcctcaagggtttgttggcaattgctgatccattgatctagtcggtcctggtgttgtaattgttgattatagatgaaggacaagttgagggagccgttcatgacggttgcgttcacatcaatgagagccatgcgcggcaaatcggctgccatggggagaagggagtcatcctggactgatgtcatctgaagaagggcacctggtcgctcaaattgttggaaaagaccggtgtagttgaaaagaatctccattggggaatgactcttgaatttttccggtccttcagggtggaggaatcgtgacgcaaaatatgcccatccgttcgtggatatgctgcggcggccatcttttgtcatttgcaagatcctcctgacgttgtcctctttcttaacatccaaaaataaaggtgcaatagtggtgaaccatccaactgtgcgggatatatcaatttccggatcccatggctctcttccatgcccctcgctgaacatggtgggtgcaggtcgattttcaaaggcctgaacaaaggcgtaaagtacggctgcttggattatttccactggctgagtatgaaatgcgccatttgcagcaccaattattgcctctgttgtttcccgcgataccgtgatggttcgtcgcgttgcatccgcccaggtattcgaacccaggctagcctctgggccccaatagtccattgaaggacgtggtatttctgtcctcaacgtttcactcggatcaagagactgctgggcatagctttgttgaagccgggaccattgttggaatgatatggataggggttgtatcgtacggcccgtgttgaggatgtcttccaggtcttgcagaaggacccgccatgacacgagatcaatcacaagatgatgggccatcaaccccaagaactgctccccggcatccgtagtgataacgtcaacaacaatcatcactccctgaacgatatcaagcgtgttctggctgattgaaaaaatcttctgcaaggctttacggtcattcatagacggcactcgatgctctctaaaccgaaggcttctagacacatcagggccaataatctgtccccattggccatccgctcgtttttcaaaacgggcgcggagcattgaatgagttgcaacaatcttctcaatcgcccgtttaatctcaggaggtggaagtggtgtgtcgagccggagaatgaactcaagagtaaacttgttgtgaccatcgggcactcgctcaaagaagagcttctggatcggagagagttcaaaccacacctcggtttggtcatcctccgcggctgaggcaaaagacacagatccagaatcttggatcctttctgccagttgtctgatgcttgggaaccggaagatatcagcaacagctactttgagtccgacggtgcgacatcctgcagcaacttgcatcgcgctgactgaatcccctcccagacgaaagaagctttctgtagttccaatttcttcaacagtccgatttagtgtattggcccagatctgttgaagtttttcctcgcgagaagttgacggcgcctccggttgaattttcacagctcgatatgccttcatctgctccagggacagcttattggcgtgctcctggatggaacgtcgattggtcttcccagatggcgtcagaggtacatgcgatagaggtaggtaaaaccgtggaatcatgaaagatggtagaacatccgacatgctagtctctgctgcagcacaagcttcacgaaactcgtcggttggaggaaggaactcgacttgatgactgccgtcatcatctggaggcgacgctgggagacatataaacgctatcagcaatgcctcgggtcgatgttcattggcactgttgcgaggaaacgaccggcgaacatctgcgagggtctggctggctttcggaaatgctctatgaagatggtactcaatgtccgccagttccaagcgctgtccatgtagcttgacttgggtatccttccgtccaagatatcggaaactaccatctccggtagcttgcaccaaatctccgcttttgtacaattttccggatggaggggagccaaattgcaagcgccagggaggtgcttcaacaaagacccgggccgtctgctcgagatttgatagataacccttgccaacgatcggtccttctattaatagttctccagtgcagcccagtggcatgagcacccgatgatcttccgggtgaacaacccatccagatccacctgtgctaaatcctatatttgctggatcgttgctcttgaggtttggttggacactgaacactgctgagcattccgctgggccgtacgcgtttccaacgtgcacaaaaggctcccagcggagaacatcgctagccaaaactgcttctccgacaaacatcaaaaccttcaaggacttaagactatcaggactaataatgcgagtgacactgggcgtcaagcatgcaacgtccacttcaaagcggttcatagattccacaagatgaccgtgacagtcgtccgttgacggaatgcaaacacagcctccttggatcagtgtactgagatgttcgataatgcaagaatcgaacgctggagaggcaaattgtagcacacgcgactctggtgtgaagtggtatggcttgccatgcgccacagaacttgacgcaaagccttcgtggtgaacaattacacctttgggtgtacctgtggacccagaggtgaatgtcagatagacggggtcttgtgggctgatcgccgacctctgagatgagctattgcactgcacctgctccgggtcaaaagtatccacgttgagcaacgcttgaacgccaagctcggccgccagagcgatatgccagccgcaagtcaataccaggggagctgcaacagcttcacacatattccgtaaccgggactgtgggtgtgatggctctagcagcacaaaggcagcaccggatttcatcacagcaagcatggcaacggccatccacttggtttttcccaagagaagaggcacaaatgacccagggccaacacgatgccaggaaagatggtcagccaatgctgaagacaagtcatcgaggacttgatatgagtagctgccatcccagctactgatggccggggcaaagggctgttgtcgtgtgcggctttcaatcagagaatggacacacgggatgacatcagggcgcttggtcaagatgttctgtcgacgcagatcgctcaaatcttcggggctcacggcactgatgttggaaagtgtgaggcccggcttagtgtcgatctgctcgtaaatatgaatgaattgggagagaatccgctccatttgacagacctcggttgctgccggatcaaaagaagcctcaatccacattgtcacggctgaggggcgacatcgtaggaccagaggatacatatcatacgccacttgggtcgatcgactctgggagaatatatcgggaagttgatggccatctcgaggctcgactgagagcagcgtctggaaatgacatgctgccgctggcccaggtccaaggcgaagcagattttgcaatccgacatgttcgaactccatcgatgctgcccattcgtcctgtacttcaatcaaagcatctgcaacggtattcttcccgcacagcttgatgcgcaccggtacgctggcgagtgcaggcccgctcaagtcctgtacgccggcaacagatactgcacgacccgcgttgactgctccaaataatgtatcgtcagagccagtgtagacagattgcaggatagcccacgccaaccgaatcttggtgccaacggtgcttgaggaaccactgccagattgaatgctaaaggacctttccagccgctcggttggtctggcagaatgacccacagtgggtagttgaggaaatgccaccatcgtggcctcgtgtgcatcacggaacatagatctccagaaatcattggctttgtcttgagtctgctgtacatggtccactagtggccgaaaggggtggaaagccagttcctcgtctctgtaagcggcgtcggcttggcgcaacagcaatgccatcgaccagtggtcgcagatggaatggtgaatgatcactttcagcttatattcggtgacattgaagaagaaatatgccagtggagcccctgctctccaggaaggactgctgatctcaccgttgatgccgtcgtcggtctcctgcacctgccatggaattgatcctcgcactactgcctgcatacagccgcgctggctagtgggaatcatgcgagtcctcaatatcgggttggcttgggctgttgtaatccaggcctcctgcagcttatggtggtcgatctctcgtggcagatggtattcgtgctcgatggtgtatgctcttggatccttgaaagtgagggctatcattgcttcctggagagcggtgcaggggtatacatcttcaatctcttccagagagcagtgacattgatcggcaacttgtcgccaaatttcatctacctcattctcctcttcagtcgatggggacggaataaaggtgccttttttgaacgagatcaatgtttcctctaatgaatctcccggtggagtgataacacccgtggcaggcatatctgttgatggtctcatactgtgttcgaggtgctgaatacccataatttcaagtctctttgcttcccagtcgattaggaaatatcgctctctttttggggtctatattcacttacctgttccactcaattgtctcttgtgttattccaggttttttccacgcacgatggatactatcggtattgttactttcctatgggaatagggggtttgtaattggcaaccaagaggcgagttcgaatgagaattatagaatatcgacatccacggtacctagtgctacctacacctcagagtaatcacgttatgggctccatacaggcacaggataaacatcatgcgccctgatccaaggaatttcacataaaccatggcatatacgatttgtaaatgtaacatgatagcttccttgacgtacgtagtaaaagaaatcagcatcttttaacaacggcttcttcttttccggcgatgtctaccttgttttcgttctgccaaggacttgacatgtaaaattcatcatcgattgagctgatttcaagatgtctcacaatatgcttccgaaaatggtaatatgaaagaactgcacgaactgcgtgaactgcctaaatgggaattgggttacatccggaactccacgacctaacccacacaccttgacgtccttgacatcaccgctcactccactgattctaccattcggccaatatgagaaatcaaaaggttgtgatgacctagagactttggtgcctggctttttgattgttgcctggaatcgttcgcgtggtatcagagtgcgaagtggttccccctgattcttaccatctgacaaatgactcacgagctcctttacaagtttattcagttccctagttacacacgaaattagaaccccgaagatggtgccaaaagcccctgtttaacaaaggattttctttcatcaaaacgctgtgctgatggggtggaaatgcattctccgtcaacttccccgcagcgtgtcgacacaccaacatcgccagagaatatctccatcagttccgatatggccgcaaattcagcgaattcaaaagaagagacagccaaaccagcaagtctcggtagctatgcggtgggttatgatttattgatggacccggctttgtctgtcgcttacacccacccctctagagaattctatcatatggtacctctaatgggggtatctatattatgattttgggcctggtttgtgctatggcttcaggagtcgtgagttagagcaactgtcgagtactcaatatcaactaatgaaactccaggctcttccattgatgaatattgtctttggccagctggtcggcaaattcaatcagtactttattccaggatcaggtatcacagagcaatcattcaagtcctcggtcaatcaagacaggtagatatctcgccctctattcctcatggcagcaaacttacgctctccttctagcttatatattgtgtatttgtttatcggaaagttctgtttgacttacatatctatggtactatggctttacccctccataaccctattgttactcacacgatatagatttgtttccgattgaccagcctccgcgcctcaggggccttgcgcctggagtatacccaggctctcttttcacttcctatgagcaagctggacgagatgtcagtcggaactgtgacacatgcgattacagcgctgtcaaatacgatccagcaaagtgtttccgatcggctcgccattctgttccagtcattcgccttactcgttgcggcttacgcgatcgcattccgttattcatgggcactgacgcttgttgtcagtgcggccattgtatttgtggtccttgggtttagcctgacaatgccgtttttggtgaaggcacagcagagtgtggacaaagcggatgagaaacatgcagccctcgccgcagaagtattcggctctattcggacagtattcgccctgggtgctgagcaaccactcttcaaaaagtatacactatgggttgaggaagcacggaaacgtggcctacgtatgtctttggtcagtggagtccaccttgctatgctcttctttgccatgtatgtcagcttctccctggccttctggtttgggttgaagctgtatcgcgaagggcatattgctaatattaacaccgtgatcacgtatgatcatcctaacttcgaatctttatgatgccgttttctgacaataaatcagggtattcttttccgtgctcctcgtggtcactattttgggaggcattgcggggccactgatggctatttcgaaagccataagtgcatccggagccttttttggtgttattgactccaagccagataatatagctggcattcgcgatccggagtccaaccatgctgatatcgtgtttcagaacgtgaccttttcctaccccacacgagcagaaatcaccgtgctcaagggattccatgctcgatttgagcgaaataagaccacggctctggtcggaccctccggttcggggaaaagcaccatcgtcgctttgatcgagcgatggtatcaacttcagtttgaggaagaagaggccacgtcgggccatatccatgtgggagctcacaacattaatgacctggatgtgaagtggtggagatcccaaattggacttgttcagcaagagccatttctgttcaatgactcaatatacaacaacgttgcttttggtctgatcggatcgcagtgggagaacgatacagaacccgtgaagatggaactcgtcaccgcagcttgcaagcaagcctttgcagacgaatttatcgaccgccttcccatggtatcgttacacctcttgcactgcatttctttatgacggaaaatctgattattttatttctagggttactcaaccactgttggggaaggtggaattacattgagtggcgggcagcgccaaagaattgccatcgcgcgaagcatcgtcaaccaaccccaaattctcatacttgatgaagcgaccagctcgatcgatattcaaggagaaaagattgtgcaagccgcccttgatcgtgtgtccaaagatcgcactacaatcatgatcgctcatcggttggccaccgtccgccgtgcggacaagatcatcgtcatgaaagatggccagaattttgaagaaggttctcacaaagagttgatactcaaggaagggatataccatagcttggtccatgcgcaacagctagagccattgacagatttgatggataccgacatgccagtttcgatttcttcgcagaaagaagaagtcagagctcaggcttacaccaccaaagaaagcagcgatcaaaattgccaggatactcccgagcctgaaagagcctttggctttttccacagctttggggtgctcatttatgaaaatcgtagccattggatcttctatgcactgacactgatcggggctataggggcaggttgtaagtatttgccttgctcttttgcatatttccaaatatatgcttacagattccaatagcgggattctccctacaaagttggctttttgctagacttgtgcaggttttccagttcactggcgagaagctcgtgcacgctgcgaacttctgggcattgatgtttttcgtcctcgctcttgccatggcgaccttctatttcatgctgggattttcatcgaattcgatctcgatggtgagtcttacaaatacacggacttcaaacaaagctaactgttcagtttgtcgtgtccaatgctcggatggattatttctacaacctattgtccaaacccgtgtcgtactatgaccgcgaggaaaattcctcgggtactctgatatccagactctccactgattcaaaacagttgcaggaaatgtttggtcccactggtgttttccctctcatctcgatctttaacatcgttggatgtgttgcaatctccttcgcctttggatggaagctggcggctgtcaccttttttgccgccatgccatttttatttttctctgccttcatgcgcattcgatatgaaatcaaattcgagagcctaaatgccgaagtttatgccgatagctccaagtttgcaacggaggcggtccgggccttcagaacggtcactgctttgaccatggaagatacaattttgaaaagatattcaaccctgctgaaagatcagcgtcaaaaagccactcggaaggcgtggtacgcaacgttggtatttgcgttttccgacagtgttgagctatgtgccatggctctcgcattttggtacggcggccagctcctcgcgtctcacgaatatgacccagttgcatttttcgtggtctatatcgctattattcaaggcggccaatcggcaggacagtttttcagctttggtccaaacattgctcaggcgaaagcttctgccaatcgcatattggctgcacggctacctacttctgaacagcttcagcatgttccagtggggccgctctcttcttcggactacacccccagaccctctgttgaactaaaaaacgtctctttccaatattcttctcgtgagataccaacctttgttaatttggacctcgccattgagagcggtcaatttgtagcatttgtcggaccttccggctgtggaaagtccacgcttgtctcgctactcgagcgcttctatgactgcactcagggatgcatcttattcggtggccgggacattcgttctattgaactatcctcttacagaaatgctttatcactcgtcgcccaggagcccaaactcttcgaaggaaccatccgcgagaatctccttctcggtctcgaagcccccaataacccgaacaccgaggaccaaatgattcaagcatgcaaggacgccgaaatttacgacttcatcgtatccctgccagatggcttcttgacagaacttggcgtcaacgctcaagcctcgctgagtggtgggcaaaaacagcgtatttgcattgcgcgagcgctgatccgaaaaccgctacttctccttcttgatgaggctacatctagtttggactctcagtctgaaagtcttgtacaaggtgctatggagagattagcaagcaagcgaaacatgactattattgcggtcgcgcacagactagccactattcagaaagccgatgcaatttttgtctttgcagaaggggcgttgggacagggatcgagggttattgagtcgggaacccataatgaattgttgcacagaaagggggcttattggcagatggtatgtttcccgagccacatctacttcttttgactaacgtgattatagtgccaagcgcaagctctagaccgatgaaaggatgaaattttcaagcagtactcattatttctcttctcgtatcccatacttaatatatctccaagactagcgcaaaacacggcattattcttcaagaacctactgagcgagtatctaatctccttcatcaagttccgagtgtacgaaactcggctgcaatgctgtggccctatgtaatatataaatatatatcattccctcctcctcattcacctcctccaaccacttagttagaatatatgattctctctcatgatgattctagtacatacgaccatagggtgtggaaaacagggcttcccgtccgctcagccgtacttaagccacacgccggtgagttagtagttgggtgggtgaccaccagcgaatcctcactgttgtatgtttttgtcttttgttgcttcaaataggaatggaatggcctatatggctgcagtataaacctcaaagctcaagtgtgtatcgtattagcatatactccgtagaacttcgtgcaacaaatatgtaggagggaaggtgatatatatacactgtaaaatataattttagcaaacacatatcaaattgccgaagatatacatctcagccgttgaatctgacttctcaaggagatatctacttcatgtgctgtggtttgcaagtagccaatcagacgagatttgatatttagatcgatatcacgtgaccatatttgtacctggcttatcgataagagtgccaagccatcagcaacccaaaacttttccgctcattcgatatttttaccgcaagccattctgccaatcattcactacaaaatgttgagagaagtgtaagttatggcaatttatctagattgtgatcctagtctaattctctgccctacaggaaagccaagaacccgcgcactgcgcgcatcctgaaatcgcgggagccgcaactcatcgaacctcccaagaagaccctgattttccacggagcgaaatgcccccaaacgctggacaccgtgctgaagaccttccacgctttgacgaagccctacaacgttcttttccacaagaagaacgagaacttgcatccatatgagaactcggaaagcctggaattcttggcgaacaagaacgagtgtggactcgtagcattcggaagtcacaacaaaaagcgacccaactgtgttacattggctcggatctacaactcagagctgctcgatctcgtcgagctattgctgctccccccgagagatggcgaggtcatcccgcccatcaacgaacttgttatggacgtgggtcttggcctgcgacctatgatgctgttctctggtagcccctgggacgatcctacatcgactgcgcacaaaattctcaagagcactcttcttgacatgttcaggggcgaagagacgacccaagtcgatgtcgagggcctgcagtacgtgatgatggttggtgcggaggagccccaagatggcctctcgccggttatccacattcgttggtacagagtcatcactaagcgcagtggtcacaagctgccccgcgttgagttgcaggaggtcggtcccaagttcgacttcaaggtcggtcgcacacgccaggccgctcctgaggtgcagaaggagtctatgaagcagggcaagcgtcccaatgatgaagcccgaactaagaagaacatcatcatggactctatgggtgacaagattggtcgtgttcacctcggcaagcaggatctgtctgacctgcagactcgtaagatgaagggtctcaagcgtcgggctggtatggagtcgtccgacgaggaggaagagccgtccgcggacatgatggaggtggatgtggtttcttctgatgaggaggaggaggagactcacaagaaggcacggaaaaactaagatcgatttgcatgatttctttaaggagtttgggccggacgggatttcgttttctgcgcctgtatgagcagtcttacggcatatgaaaagttattttaaaacctctacatctaatagagatatttcctccaaccattagtttacactagacttaaaattcgctcgtgtgtccgtaatgaagattttatatacatccacgtgaccatgacgtcggctgtattctcacatgccgaggcccttctcaatgcgggaaccgattaaagtgccgtcccctctctcaacatttcccgccgcaggaaaacctctatatctttgctctatttcttcctaatgacccgtgacagtctcctggtctttactcgttgtccatcgccccgataatcaccccgaaacgagtccgaccttttaccgaggcccagagacgccatggatgtattgctcgtgagttccggagcgtatccgactatacacagcagtattgacattctcctccgcagtcccaactgaacgcgctcgttctaaagcccgaactcgcaccgctactgtcattagtgaagggtgcacgcaatggaatcgtctacggatcgaaagttcgctttccgcatgcgctggtgtatgttagaccttggacagccgaaaaccccggtatatggcatagctgactgactgcgactgcttctagaatgatatttctgttcagatctggaacgtacgtccccacgcgcgacctcaccccccagaacgaaactgatagctttgttattcaggatacgtgaaaagacgaagcttgttttgaaagcaacccgcctgcatgcgcgtaacctggccacatttgccctcatatacaaggcatccatgatcgtgctccggaatataccagctggcgccgggaaagaaggccgatatgatagcttcttcgcaggcctgctgggcgggtatgcggtttttggacgacagccgggcagtattagcaagcaggtatgtaatttggacatgcgcctgattgtgggaactattcaaacctcgactcccgaatacactccttctctgcagagctaactcgaatctagattgttatttatgtcttcgcgcgtgtgatgcttgctctcgctaaactctccgtccaaccaaaaatgcaccctctttcctccctcatcacgtccgatgctcgcagtcagatcatgaataatgcttaccccgttttcgccggtatgacctgggcgatggtcatgtacattttccggtggcacccggagacgctggcgtcgagcctgcggagtagcatggtgtatatgtatgtttaccctccactatatatgattagcctcagtttgagtactttgaaagttcgagttattttccaatgctaacattcatgtcaacaacagttacggcgactcagaccattgggattccctccgcactctgcttctacacaacaaatgagctctcagcggggccggctcttttagctttttggtgtgttatggcgtatagaccggatatcattttgttggtgttttttgcaagttgcattcgagataggcatccttcaggccctactcatcatcccctttttatcctgtattatgaggcatggaacttttttttttcacacatttttgacttgaaatataagctttttcagctttactttgtggggattttcgtaattggatagactcaattgactcaaataaatttgcttgaatgcaagattgagcatataaatttgaagcttgacactccttggaacacacatctcacttttgctgggctgtttaatattgtgttgtgatgtgacatagtaggttgaatatattttgaattttcgaaataatcatgggggaagctgggaatatattcctacgaggcagttcctcattaaggaaggtagtgcatactggaagcttggtatttctatggtcatcgtggtggcagttgaaattcaattcaggggaggagcagaaatgtgggaggtaaatggcatcgtgcaatagaagcaagaatagcttcatcatatcccaaaagagacataggagaggaaggtatcagaagaataaacaagatcaacataacaaaccaaaaagtgtgagcatagatggtacatgtgaccgcatacccaaccaccactcctccatcaacaaatgaagatagaccaaaaagagcctcaaaagaaacctcaaaaagacaaaaaaaaggccccaaaggagcacctctacaacctgggtcactcagctgccgacggggtatggatggcggtcacattccggccaatgacttacatgcaaccctgaccatgggaagaagccatgaagtctcagtctcacaattaagttgatcaagttcaaaggtgagggttgaaccacaggcatctgatcatctctgcactgtaactgccccgccaaaacggaacaattacgggcacagtggcttatgcggttcccgcaaggctacctgggcgaggctttggaatatctgccttgatgttaatgtaaagggaacatattgttccaaattaggactagtacgggactagcacggcccggccccactttaaatgtctgctccacctcttcttccatgcaacccgggaacgttaaaggttatgtgcaccgaggatacattaatcgtacatgttcattgggcttttcgaaaattgggggtataatgatacatctcatccaacaggaaaacaacagggatatcagaacagaaaaagaaaagaaaaagaaacgtcacaaaaccgaactactgcccatccccttcaccaacctcaacaagaaccttgagctccccatccatccagtcaacagcatcagtagtgagcaccgcaatggcccagtccttctgattctgcacatgtagcaggccatccggcaaccaaaccttgaccttccacccatccacaatggtagactcgcgagcttcttgcgtagcagcattcacggcctggaattccgtcaaaccggggatttggctcgaataccgacggagaattgcctgcttgaccatgtcgatgttggagcactggcctgcgggcagttcaaatctggggaggatgcgctttccgttttgcaagatattgacgcgaatagaagtttggctgtggccgtgagaggagtccgttgtgttggccggagttgactcgggcagagaggtgaatggttgatggaagtgtgggtcgggtgcttcggttgggaggccgtgtcgggcggcgatgttctcgcggatgatgcgagacacgtcacgggtgatactactcgcgctatgggtttgttagtgggaattgcaaatgtgtttggaaaggttggatcgattacaattcaactcgggctgggaggttgcggcctccgccaatgcgccattggagatctgaggtggtgtccgcgtggacaatgcggttgatgttcgcatcttcgcaaatcgatgggcagtcgtagttcccgttgtggacgacgtggtaatggctgtcaactgcggcgacgagcccgcgccaatcgggttgctggagaccggagagagaccacaggttatcaagctcaaagttctcgttgtacgtattatagcagcgggcgatctcttcccagtcacctgtgtatccgtctaggaggaggtcggtcagaccgaggtccataggctgggacgaatccattgcggattgctgcatcggcggtgggggagccattgactgcgacagatcatcgcgatgggatggctgattctgcatttgtagatgctgctgctcgggagaaaattccggactattcgccgacaactcttccgttttacggcgacggcgtgcttcagcaccacctcccttgcgcgtctcaatcgcgtatcggcgttgcctttcgttggtgaccatccgtctgagcaaaggagtgatcaatgagatgatcttgttttggtcacgcggccaagtgtgaattctcgtccccacgccatcattaacggcatcctcgccaaaaaaacgttcaccatatccctcagcatcaaggaactggcgaacacagttccaaaggcgtagcttgaccatttctgaatctccccttcctcgctgaccaacacaatcctgtctttcagggtgttcatcgtccagcatgtaatgtttagcagcagactggagatgtataaagttctccggtgagatcccaagggaggcgtacaactttgagatgggaggccgtgtgtacttcttattgctagagggctggcggaacagcgccgccgcagaatgaatacccaccgcacgagcatccgatagagactgctgctgctcaggccgaatgtctatctcttctccggtatagtcattgggcgcttgctgtgcggaatgcgactgatgctcttctccggtatagtcattgggcgcttgctgcgcgggatgcgactgatgctgcgtgtcagagagaccctcgccagccaaggcggggtcgaggttatcatcatcctgatttcgcttgcgctttttggtcgcggttcgtgtgagccccgaggattggggatgttcggtgtgactaggtgctcgcatgtgtcttccgctgctcatgccagccccgaagttcgcgtcgccgaacccgttcccagagagatccatgtctgtgtatgaatccagctggtgatggtggccagctgcgccggctgcggcggcgactgcggcggcggcagcccattgcgaaacatcttggtctgcggcagctgttgctgcctcgactagtcccgcgagctggttgtcattgggcgcatatccgttgttggtcaattgcgcgttcgggtcgaggtggggggcggttgttgtgtgttggggtggaaggtcggaggaggtagtggggagatgttggttggtagaggagctcatagtgtcgattgagacactcggttcgataagctgataatgtcggaaagcggatattgaggcaaaaagtgcaaggattgaggtaaaaagagcgacaagatacttttgcttgagagggaattcgagggaaaaatcaaagtgagttcgaggtccccgaattacctctagaagggtacgtcttccgagtcgaagctcttatccagctgtagagcgtaataaaaagcttcacccattagaggtactgcttcctagagcacagttgtcccagcgcgccgcacccaagagggcgagaagcgcgtcacagtaaaaaaaaaggtcaaaacaaaagtatggagaagtgatgcgacagcttcgtttggtttggctgataagagacgcgcgacggttgatgtttgtgcagtttgaagaaacaacagacagtgcaaactggaaaaacggcgagggtcacgtgattatgggttccattccaagtgaccctaacaacattttatacagaatccatgacatacctgacttgaatttgagcaccgaatctcatggacacgaatttgaagtgtttaataatcatttctatgcatttgaattttagatatcaccctttgtaagaagcacaaggcaaaaacagaaactctccataagtacacccaaaacaagaaatcagtccaagacaatcaaaaaccgtccgactatagcagaccacatgatcctgtggattagaagtaatgatgttgacagatgataaaacatgttccaagggcaggcctccgtcatgacgagatggtaaatagatggcatatagatcattggcccacataaacttttgcaatcgtagaataaaaagaagaagattcaaagaaagcagcacttgatccagccaagacagctcagaacccatccccctctttccaaggacgaccagcctcctgggcacggtactgggggttctggccacgctccatagcagcagttagaaggccaataatctcctgttgcttctcctgaagttggctgacgaggacattgcccttctcgccgtcagagtcatccgattcatcagcaaatccaatgtcggacaaccacatccaattatccaattcctgctggatctcattcctcttcgcttcggcttctcggtaattattccactcctcgtttccgccaaaacaaaacccatacccgtcacacagacacacattctcctcaacgcagagaacaggctgtccggtgaagataaactgccacagatactcccagattcgaccagcgatataatcactcagatccgtcgacagcagccaatcgcgatagaacacaaaccgggcccgcggaatggagcggatgcgatcgcgggacacggcgaattgcgcacagcacggctgcgccagcacagacggaatctcctggtcggggaatagctccccccacgcacgggccagcatgatctcctcctgcttcgactcgtcttcctcgagagcaccggggtgcatccaggccggacagcccgggccgaacccgcagcgagtattcatgtagccctcgcggatgacacggttcagattgaggcggcggagcagctgcgccgcgtctccggcaaagaggttatcgttgtgccaggcgaattggtgcgagtgcatgaacaccgccacgtctgggagctggtcgtagtggtcgacgatgtaggtgaggtagatcatgacctcgtggcctttgttcttgggcgggtggagtggtgctttggggtcatctgcgacatagatggcgtggtcccaatctggcagttcttcggcaatccagctggtgtcttcccccttggttcgggtcacaaccatcaccttggagtaattgtagcccgagggctttgggatgcccgagatgaagtccgggagaggggcatagaggttcttgcttgtgtggccgcgggtcgtgttccaggctcctgttgtattggatgatgagaccaggtcgcccaggccgatgacctggggtacgtcacgccatggtcgtgagaggcttcgggttgtgaggaagaaggcgaggaaaaagcagacgccgagaaagaagaccgctcgccgtgggagaagcatggacggagggttgacgaagcgtgcacgggattattatctgttgcacgagatgatggttagctgcaatgtcactgtatgccactgtgtcgcgtgcacagggtgagaggatggagatcgcgaggtacggaatgcagaaagcttggaatggagcagatgggaaacaatgccttacatagcttagtgtaacattgccccgagattgtaaggaggtggaggaaaagtgacccgatctagattcaagggactggggtcaccctggccggggaggctgctgggctctgggcaaatcagacgcaagtggagtcgaggtcgtgccgtcatgacgaagcttctttcaatgcgatttatagcatagggaacttcatatagaatagtgagttacagttataagagaagaccattgactaattaatacggtaaatatcagtcataatgaagcaatgtaaatgtcataaaatattattcgtcatattaattcatctaacacgggaagcagcatgacgatctctccaagaattcagctacgcggcttgaatcggctacgccgtggacaccaaaggtagatctacctctctacgctatactctcctaatccaatcttcacttgcatatgcacatcttcatttgaccaaagtaatcattgagagcaaataccatgagattaaaccgtggtataaaaatcgtgaaaagaaatctgggtatgatcttttgctcgcgaacaacgccatgcagaaacgctggtgtaaagaaccggggaatggagagggccgggcagaacccgaagagagaaaaatacacaaggaggagattatcaaaaggagtccgggatcaagcttcttcatcaggagtttcctcaactgatgcggtccggcgcttgccgtgggatgtggactcgggttgagtctcggcttgagcagaagcactacttgcagattcctcattggtaccccatgtagtaggaatagaagctggcctggcgtcaaaggaccctctaggagcaacgtcggtccattcctgagacggggattctgcacgatgttccactgaggggacagtgggtgttggttgcagtaccggtggactaggggccccatttacgggatgggtttcagcattgacggtgccgtgcgcatttatcccgacgctcccgctcgtttgatcctgagcaggaacggggaatggagagacctgagaagttacagcgctagccacggctggagcagccggggatgtcactgtagtggtaggagtaggttgtactgtttgttccacaccgccggcactattatccatacgctggagaggaaggagggtccaaccagggggaagagtgagcccttccggtagacgagggtctccagggtttagaacatcagtgcccgggtttgcgccatactggtggctcgttgtgaataaagaagatgccggggctatgtttggaggcggagccggttggccggcaccaggttgaccggcagctggtcggttaacagcccttgcttgagcaagcaaccgctctagttccccccgaagctggcgcacgtgatttagatgctctgtagcagctcgaagggtggcaatctcttggttcagccggtgctcgatgtgcagcaactgatcattgatttcagcagcgatagatcccccagccgcagcttgtggggcgggggtgggggcttggggacggcgcccgaatccaaatccaaacccgatttgtcctccaggggcattcgcaggggggtttgcccgcggcgcattaccttggtgaagattgttgaataaatctccacgcacagctccaaagccgatgcggaagggtccaaactgatagacccgagcacgtggttgtgcatccgcaccttgttggcctggccgaataccaccattctgacctccgcgtgcgttgttgtctgcaaccccggcagctccctgagttcgctgtggcattataacaggacgtcggcatgtcgggcaattttgttgcctctcaagccagcttcggagacacgaaaagtgcaggatatggccacatgggagcttctttgggcgtagacggtcaggaacacgctgtggtgcaggctctccagccgcatcagcccccggttgcgccggccgaaccggaatcatctcttcacggcagatgatacagacatcttcccgggagatttcctccgctgttgcatccggatacctctgatgcatatcccttgtcgcgtttctgtaacgcatgaagtccataattcgacgcgcaaatgagcggatggtcacaacaacgtcccgcagaatgtggatggggaggccgtagaaagtgagcagaatgccaaagaagctcaaataaatcaggagtttcaacaaatcggtcaaaagatccaagtagaagacccaacgacccttctcctcccacccgggcacgtcgatctccaactcattgacatcgttttcgtcgggcagattgtcaggaggggaggtagctcccgcgcgggcatgttctcgaattgcttcgactcgcgcaacacggatctcatccctacgttcctggatcttggcctttatttgctggcgggttatggatatttcggttaacgcgataacgtatcgcaggagggtggaggtcgagaggattagcaagatggcgaattcgaatccaaacatcaccatcatatccggccgtgcctgcgtgattacagtgtgcacacagtaccgtaacataaagaagttgaacgacaccgtcagcacgagagatagcgccagtcgagtatggaacaaccggggattagccggcggctgttgctctaggaactcaacgcggccttcgccaatccatccccagaccttaccgaccagcagcgaaatgaacatgaccagaaaccagcctccaagttcgcctcggaagatggtcatagccagacatgtctctgtgacggcgaaccaggcccgctcgtatagttgttcggtctcgattggtcgcaagcgtccgtagagaagtcgctggagccagaataagataaagccggtgacgagaaggcataaattcgtgaggatctggagatgtggtaatgggttagggactatggccaagcgcgataacccaaactggacaactcaccataagattcgcactactctgagagagatagacgcatgccgaatagaaattggacctctgatggagagcttttagaaacacaccagcggctaggaccactgaggcctgtgaacgggttccaatgttagcgggttatcttccccatcagctgcagtacttaccccagcataagcggccagtctcatggctatcgactggatcggacaagccgaaggtcgtggaccaaaggaaggataaaaaaggtgggcgtctcaaggtagcatttggcggagaaacgaagtgaatgccgtttacttgggaggagtagtagcttgatctggacagctttccagaataacccgtgggcgcctctccgcatcttacgtcagctaccagcacgtgctgccacccagatctatacatacctttacttaacacatgaatagattcgatttcgctatggtggagtatatatttggtaatcatgtatagtctaatatgttttgttgaattcaaactattagactcactttaaacgtcaggacatgtccgtcgatcttcgatgattatctgatcatatccgtcatgtgacgtcccacattgcccgcccttggaagaagcaaccattgtgacaccgttgtcctcgtcatttgcatcgaacagagagatatcgtcatctctgaatcctataataaatgaattatcgggggtgatggcctcatcaccggcattgttcactgcctcgcgcagccaaacactaacttacctcttggcagtgtgccccttctccatcgccttcctagtttacatcaattcatccatctccttcgtcgtaacagatctgatagggctgcagaatggagtcggagatgctgtcggaactctaggattcgcagacgaacttcttgcgctggttgcctgcccactttggggtgtcctctcggatcgaatcggagtccgccatgtaagcttgctactgacccttgtcaggataattcaatgatattgacgctagataggtatgtacggcaggctatgctattgtagcacttgcgctagtcgtttttgtgcaagctacgaatgtctaccctcagcttctcttgggaaggttgctctttagtatcggtggctcagcggtatcgaccatggtcactgcagttttaccaacagtcactggctcagcctttaatgcccagaaatatcgcgcatctatgtcttcagaattgactatcacaccggagcgtgccaggaatggtcattccgtagatgttgatgctttcagagcatcgccgtctgcgcgactctccgggtttgttggtatgtgtgctggctgtggtgcgctcgtggcactggttgttttcctgccgcttgcagcccgatttgagaagatgggattgtcgccatcgcaggcgatccaacgcagctattatctggttgctgccatatccctgattatctgtctagtatgcttcattggccttcgcgatcttccaggagaacaaggcaaaagttggagtgcactgtggaaaacctctcacgaatcggacgatgacgaagatgatgacgatgacatatatatccatcgcccaagattgtcatactggaagcagttgacaactgccctcacattgggattccgaaaccgtagcattggactgggctacgtcggaggcttcgtggctcgagcctcttctgtggggatatcattgttcattcccctggccgtcaatcactattaccgcgcatcgggcctctgcgacgaggaacgtgaaccggttcctgggtcgggattaggggatatcaagaaagcttgcccacgtgcatacatcgtcgcatccatactgaccggggtgtcccaattggtggcattgattgcagccccagcatttgggtacctgacagacaaatcacgacgatacaatttcccccttcttttcgcagcattagtgggaataatcggctatataatctttgccatgctcccaaaccctctgttcgaaagacccgacggcaatccgggtgtgttcgttgtgatggctctgcttggaatcagccagatcggagcaattgtctgcagcttggctgtgttgagtaacggtatcttgcgggtcagcatcgacaatgaaacattgagaaaaatatacgaggagcgccgtgtccgcggggacgagaatgacactgagccagatgaaggccaggctcttcttcccgggtcggccaaccgcagattggagcatctgtcccacctcaaaggctccatcgcaggagtctattcgctatatggtggagcaggcatcttgcttttaaccaaagtgggtggactgttatttgacatcctgtcagcggggacaccattctatattatggcgggcttcaatggcgtgctgcttgtcataggaatcgtgtgtggggctatcaatcacttcggctcctggcccggaaggacatgatcaatttcgctttcatttgtttttaattttataaaattgtcatggtcgtgcaggatcttgttgaactggctgtgaatataatttcattctcagcagggagaaaacggccccaggttgaattatcggcattgctcggctggcaatagagtacacgtggtttgcagtgtcagcggagaaaaacaaattaaactattgaatgaaaaaacggttcagaagattaattaactcggcatccatggcgttgcgcgttcatgaaattgggcacgggctttttcatcgggcgtaagtacacgctaactagtcagtgacggggaaattacaaaagataatggcgacaagtatataagcattttgaacagtaaacatgtactttgtatactatttacttcaaaggagttgagttttcttatatacaatatcttcctccatacacctgaagtttcccaactcatggtgatctcatcccgctagtctcgcgttaatatgaagagcatcaaacaaccttcccaaagaggcagcctgaaccaggggtcaatccggctactagtcccaaaccagcctagtcccacagtaaactttgcactaaaaacgcctctaattttaaaccgcaaaccttcggaggcacttggacgtctaaggttggatcttctcaaggttgcaaggtcgaatgcggaaatgcccccctttttctaaacatcaccggcctcgggaacccctggggctcgtgttggcgtccgcttggactgcaatgtcggccaatcccgctatgccaaactcgtcgcgacgacactatgttgcatggccaaagtcaattatgcgcctaacccccaatgtctctctctctaacacttcttcctctttcacaccttcagactcaagcagtccgtcattcactctttcgtcgtccgacagtctttcgttaaaatccagtccttcgttttgagcaattgttgatctacttcaagtacatcgtactcgcattctttgtgcacatcttgattatcaccaatttttcagtataaacaccggttcaccaccaatctatttccaacatgcgtttctacaccgtcgctttgttggctggcgctaccgccgctgccgccggtaacaccgcaaccctcctgctgcccggcttcaagggccaggatctcgaggctagcattattgaatccgtgggtaccgattcagttgcgcgatcaacgcgctctttgtccgagcaccttgactgaccatccacagaatggagatgcgactacctacaagatcacctgccctaagaccgttgcggcctgtggtattgccggcgagggcatgaccgcaattgctgccccgacctccatgcagctgcagaacatcgacctccagggaacgtaagtaccggcacggactttcctcgtaagaaacggattctgatatcaaaaaccagccttggaactgtttcctgcaacattgctggcaccacttatgcctcctgccaggcttccgccggcaccgtgaccccgtcgggaactctggcccaagaagatctgaactggatgccagtcactatctccgccaccccgaccccgacgtcgacctccaccccgacccatacccccactagcaccagcactagcactagcacccctacccccaccagcaccagctcggaaattagcaccagcacgaccgaggtgagctccaccttcaccccgacgatcacatcctcgccgaccctggtcatctcgaccaccaagaaaccttcttcggcactcatttcgtctgcccctgtggcctcctccacccctcttgtggtcgcgtccaccagcgctgctgccagcggaagtgctcctgccgcttccgccactgcctacaacgccgccggccagttggtaggcagcatttggactgttggtggtgccttcttggctctggcctgcgctttcgcgtaagctcaacgcggaatatctatacgtttccgtcttgtgcggcttttggttgtgaaagacaagcttcgcgcttgtcgatttattaattccggggtttccgacgttgcttcttacggatgtagtcctgtatactccacctatatgtgtccatctcttattctttaatgttttatacctttctccacgacagactacgatctagcgtctcttttttacacttgtatcttcagctattgaatatacctttcctttggttttcgagacttttctttgttgcctctttcacgccccggacttgtagcccctgtggatataatccactcctgaaagatatccacatacgcctcattgtgtctcatttttgggtatgcattaggggactccaccgaccacggtccctggtaagtacgccaccaggcaataaacaatcacttcattctacgtaggactccagcaaaacggcagacacacaatagtgagttttcacccagtcatattgatataagagaaaaaggtcaaaattaagaacaataaaaatacgaaaaacacaaatcaaactcaaagttcttgccaacgccatgcggcactcgcaatactctcgagggagggaataggaatcactgggtcggtctccggcacctgttgcaaggtaatgatgagtggagagatatcaggtaccgcggtaatcggtccacccggtggccggaagaccacaattgactgacggacctgtgtcacatatcgacgctgacccatgatatatgtaggcggctgctcaagcacaacggtctcaaacgtgacctcaggcacagtccgactgaccgctatagtgattaccacatgcacttgcccctcagagttcgccagccaccagtccgcatccgctcgcagtttctttttagcctcagagactccgacttccagaataactgtgggccacttttcgcttcgacccggaggaagttctcggggaatccatgatccatctggttctttggcgcaaatgcctccttctacccgtgcagttgtgagcgaccattccgttcttcgcatattcgcaagagagacagccattactagatggagctcacccacgagggcatcgtggggtcggcccggtatggtaacgatcaggctccgggtgtgtcggtcgtaaagctggcggtattcattggagagaatcagctctgctatgtctggtggcacattggtgaactttgcatattccgtgaccagatccggggcactctggagacgggccagaattgacaggatggcgtaggctgaggatccgatcgtttccaccgcacattccacatcgaaacaggcaaggtcaagatcagttaggtccataatcctttcggcaacaggcgaagagaaactgatgtgtggttccgaggaaaagaccagttctgtctcatcgaagcttcttggtgatcagtcaccgagtcattcttacctcaccgacttcttgtttctgagctgcatctttactcggtaggtttgaatagctcttccataaatggtggaaatgccctctcctgcgattcaaatggtctagtgaagccttcaagggtagaaagttaaccgtgaagctccgcgagctctttgatcactcggataatttctcgtgggcaaggcttccttggtgaataatattttcaatttctatcataagagaaatgtcagagaccagaggtttcattattcatagaaaatatatgctcaccttctggtggatattcgactggcggaccccgaactttgcggtatttagaatctggcacgattgcgatctttccgaaattaggtcacgtccaaaagcccgatgagacagaactgaccatgttgtcttcaaggtctgtatataattgatctgctgccttcttgatctcccgcagatggttttttaaacgggacgtttgcgacgagactagtaagggcaggcggtatttcccgaggatcttcttccagcagtaccatttaacagacgttgatgagattgtatagttgttatctgccagccagcatatcaactccatatgggcctgggctagaaacagggcacggttggagcatcgaaaattttgccttgcagcgtcgatgagttcgccgtcaagcgcggcgcgatcagcgtaatcccaaaggtattttcggaaggcccttctgtccagtctattggcttcaaggttgtttgcgatcgtactgacaggggttgcaatactgtccagtaatccaactgcggtggtgattgcttcttgatacatggtgaatgttagattcaaaactattgaaagatatttcacattcaggtgcagtggcgtctttttataacacaacatgtacttcgaatgagacaaatatctaggacatgtattgtgatcctcacctcagcgcgcggcggcgaagtgtaccaaaacctgtttttctcaaactattccatggattgatcattattagacaggaagaacttgagctagaaacccttccacaacactagtcagaaaatatgaacgactagagaggttgcaaagttggatgagatatcccgcttccaacaaatcatcattattcccttgccactctcttctttgtcacatctagacccataagacggatctgtagcagaagatccagtgagaagaacctcatttagtaggtcatgttacggcatctcgtatttcatgttcatttaagtggacgccacaagtaataaagttttagccgcaagctcagctcggcatttcctgcatagacagacaggtacagatatcagttagaagtcccgatcagaaatattggattgcgaaatttgggttcgaccagacagaatgctgatgtcggtattgttgtggtaggatataatatccggtttgtagctgatacagagttgtaggggatgagggtcatggcactgctagatatgttccggggttcaactttgtttgtatagaccgcgacgtcataaacacttatactcgccacatcatgcgttgacacccaaacaagagaatgtgctgccgtaaataattaaatattctaaataatggactgacaatagagagaggcgaaaacaagaacccagcagggagcgaaggcgaccaaacaaggaaagctcccaaagccagccaaatcagacgccggacataccccaacgaggcgcgttcacgataattccggtcaaacaaccggcgatgataccggcgcagggaagcgtgatgatccaacccatgtagatccaggcaaccatccgccagttgatcgttcgccaagtgccgttgcaaagcccaacaccgacggtagcgcccgtaatacactgggtggtagagacggggagctctgcaagtgtcatgttagcgtggtgatgatttgggaatagataaaagggacatactcagcctggtggcaataatgacagcaatggcagcaccgagctccatagcgaacccacgagagggagagtgcagggtaagacggttacccaagttgcgcatgatgtgataaccgtatgtccagataccaatggagatagcggcaccaccaaatacactggagaatgtgagttaacacgggcgtccttacattgatggaataaaacttacaggatccagatggggacttcggtcttagcgccttcaagggcaccagttctccatatagcatagatggttgcatagggaccgacagcactgggaacagttagtatatgagttgatagtaggtatgaaatgggaaaaccaactttgcgacatcgttcgcaccgtgggtgaaagaagcggtacaggctgtcagaatctggaggaaagagaacatgtactccgcttcgttatcatagtgatcagcatgggcatgggtcttctcgagatcgccagcgagtttgctatcgctcttctgggcgctaacaatgtcttgctcgacaccgtttaggagggccttcttcagcagccagaacaggacaggaccactataccatgctccttcgggacgaggaccacaaatgttaatgacatcgggatccacggcttgcgtcccgttatccgagttggcagtgacctggggctctgccttgagatcgggggaaccaggctcgctgttgctgttgtggctcttttccacatcagtggaacgctcagcttccagttcctctagggtcttgtggccgcgatagtagttacggacggtctcaacacggtcgggaggtgcaggaacttcaccacggcggaagagaagagggccgtagattaggtcccaaggcttgagctgccagtcacccataatcaccctgcggtagatccaggggcaaaggaagagggccgagataagagccatgccaacaccaacaccaataacagttccggctatctcacgcccctcgaggttaatcctgctactgccacccttccagacaatgagcactgtgttttatcagtagccgatacacagagatcagaaatttgacgaaacatactagtaaggaggccagtcgtcagaaggaagtagaatggaatggtgtataacgccctgagtgcgggattcttccgcagtaggataccatacttggtgatcaaaaagataagcgcaccggcaacaccagataagatgggtgcaatcacccaggcaaggaacacctggacaacaccggagttgatatcacctccccaccagataatatcatcagcaccgataagcgcgatacccatcccaaggataccaccgagaatggagtgggttgtcgaaacaggaagaccgatcttagtacagaaggtaagatatagagaggaggcaactacagcgcagcacattccaagcatgaggaggggggcgttgtcggcgaaggcatcgatcttgacgatcttggtacggatagtatcagaaacactgtttcctacaccgacactggaaatataggtgagtacaaagtcaggaagtgggaagcaggtcatgaacttacgctccggcaaactccatgatagatgcgaggatcatggcttgccagtgctttagcgaacgcgacgaaacagacgtcgaccaggagttggcgcaatcattggcgccgatgttccatgcatcgaggaacgcgaatatcgtgccaatggcgaagatgtaatcatactgctgaagaaccatcttgacggttggcagaaagcaacagcttgtcctttctgaagggttctagaaggactctgggggctgacgagataaaaaggaaattagcaggatgatccggattggatctttatatgtgcaagttccaatccaggccaggagatggcagcccttgcgctgtagatgcagtggtgcaaccatccaggatgccaagctgcccaggcccgccgcgccgccaagaaactcctccagtgtccgtgcacttgccaagacgggcctccgccgacgaatcctgccatgacatacgagaacgtgtccaccgatgtggaaagcttcagactacctgccatgacctcgctaaacgtcgggctaattcctctggatggttcagaaacacgaggtgctctttgcgaatgtccttcttccgactggcaccataatctgccttggcccttggcaggacagagcccacgccatgtaggcaccttacataagcctcgcatcgtgatattaaccacatcgtgcttaaatccaacgttcttattggccggctgattaaattattgacattgagctctgaatctaatcctgacatctggcgcacacctggacatcgacctcggttgtcgcgtggccaccgtgacccagctctctcagttcctcgacctgtcgctgaaggtattggatgtactccaccgccgtctcaagcagttctgcctggccaagcaagttcgagtgagcacattggtctgtcatgtcaggagattggctgtgtcagttgcctccataccttggtgcctttcgttcccgcgcctcccatcctcattatccgctctatttgacccagcgctactttcatccgatcccgttgagacttttgtgcgtcagcgtgctgtctccttcgagtctccgttgcatttggacctgtcatgatgaggagcgagcctgctccaatgaatttctgttagcccatccatctcccctggggatagtgttgacgtcacacgcgaattcaaaatgccaattacctttcggccggatctcgaccaactgtccctttcggtttaggagataaggcaatctcatttgttccgcgtccgctccagtgggctgcgcagttgcatgcacgtgcgccattgttaatatataggttcagcaccgaatttgccttcttgatagcttgatggcttttcaacagcttcaggctatcgggctacccgagtggctatatatattggccacgcaaatgactcgggctcggactttagcctatgcatgaatccatgccgtgcgtcacatagatagcaacgtcctactattaatatccttgattaaagaatgcacgcacagactccaatattaattctcccgaggatgcaacaaacagtattccactcgaggaaggaatatcttattggccatgttgtggcgctaaagggctctagaagaaactaaattaaccttgaaagtcccctcccttttcaccttgcccagttgggtgctctaagatgagtcgtcttcccaattccagtgtcattgcgaccttccgttatcgctgagcaccttgaatttcacgttgatcgactcgcttccttcttatagcaatgttgccatatccttatacatccgcaatgtcgaagttgcgaatgaagtcatagtagaacttaacggcgctcaagtggtcaaagatactcacatgctcatcgacagtgtgaatattgtccagtccccggctgatcgatggggtccacctaaacacattgcgggaaaggcctgatgataccgtcagtttgtatgatatgtggctacccagagtgaaacttactgagataatgcctagtatcggtattaccagtcatgacgtctccgactggaacgatagtcttatcttctgttgcaaagacgtgtcgaattgtacccgagaaaacatcccaaacaggaccactaacaggagacaccggtgcagcttcggcttttgtggctctgatgacaagagtgccattgtagtcaacttcatcacggcgctttagatcactgtgatgtagcatatcactgggagaaagctctgcaacataatcctgatattctttgtcgcctttgaatgcatccacctggagaccatacttctcaactacatccgcaatcacttgaacagccttgtgttgaacctgtaccggcttttcatggtgtgcaacgcgatagttgacagccagggtaacgacctccggcatggcattgattttcaccccgcctttgattagatcgatagcctgtgaggtttgaacaacgaaccggttcaacgggctagtgctggcgaattgaacagcaagtccatcaaagtcattgtttcgcagtagctcttcgatcttgggctgggtgttgggagaatatcgcgcttgacagatcagacgtttgtgaatggggctgtccttgatgatttgaggctggtacggattagcctcgagcgcaacaacaatctcagaaataattccgattcccgtatgcggtaaggggaccgaactatggccccccttggcatgaagctcgaagaagagattggaatggcccttttcagtgattgcagggtggacatatatggtattgtcatcaagaggtgtcgagcctaaaccgccctcgtcaaggataatagcaaaactgtcgtcaccatatctctccttgagtacctcactgatccgtgcagcaccttggttgagaccaacttcctcatcaaatccgaatgccaaaatgagagttcgtctaggtttccaatcagactcggacaaaagaccttctagggccgagaagatggctgtgagactgttcttatcatcggatgaaccccgaccccagatatattcgccatcaaaatgggcttcaaaatgtggataagtccatgtggatgcatcagccacgggaactacatcctgatgggcggtaaggagggttggcttcagagttggatccgagccttcaaatgtgtaaagcagcccgaaagtattgattttctctagctttccacgcttatgacttgaagtgatcagctgtgaggacagtttccatgatggacttctagcttacactgtgggatacgacttttgaagaacagggaaaagcttgtgaaacggaagccatcgctcatcctcgctgatttcgcctagatcgtcgtaggaaaccgacggaacccgcacaatggcctgatgacgttgtacctgtcttttcaacgcctcatctgacgagaacaagctcactgccgacggcaacccatcattggccggatcaagaatagggggtagatcgcatatgaaatcagaacccggattcccagctgtcatagaagtctggccaataaagggcagcacgaaagccgaagcaccagtaagggcatttgccaggaccatcaagcggaggcaccccatgtttttacgtgaatttccgggatcagcccactttcacgatgtcaattgatagatagataatgaaaaagaagagcgaaatcacaagactttgactaaaaggggccttttaaagaggggaaacgctgcgaagtaaaatgagcaacttttacaatgtactcgatgatgacatatcaccaacagcttacgacatgcatggatttcatgctaagccggtttcgatgtcgaggcagctttctcctctctcgaagtcgatatgaagcagctaatatcctctagccatggcgttatcatatcatatatggtctcaactattttccgctttaacatccttggcgcttttctctcgttgacaccgaatattatatttttgtgtatttaaagaagataccttgtcttatgaatagagtgggtaaagtttggaacattagcaactcataaatcctatatcattatgatgaaggatgaagcctaagataaagtgcggagtgaagtaggtacctttgatcagctcttgcgaggccgaactcggcttcccctcattgcaactttgaccccattcttatgccatatccaccatctacaatcagaacgacagtgataggtaaagcctgatagatagagatggccaagaagagccaagcataaaactctccaaacttagattgaaaggatctgctatcttccgccctacctgtccatttgtcattgtgaaatcccccagccctgtctagcagtcaaaatattggctgtatttgtccctaggttacaaaatgctcgtaaattatcgcgaacggcttataaatgtccgttatggcacatctttcctgttcgggtaaacccccggaaaaggtggatgcgcttcacctagctagaagaccatcttatgtacagagcggatggtttcctatctacgaccctctctaatgttgttctaatctgggccaagcattgcacaatttctattcattaccgaagccttggaaatacccggacgagtaagacttaagtaggaaacgattgacctcagcagctgcatcctttcagagaccaattctcaagccaacatgacaggaaaagaagcaaaggagctccctactgagactgttcagcccatagagatcaaaaatctcgcctcaattaataaagaagaagttgactctttcgacgagtcgcaatatgactttgattccgctgaattcaagaacatacccgagctagtgcggacggtcgttggtttcgaggacgacccagaacttccagtcttgaccttccgctcgattcttctatcagcactattttgcgcaatcggcagtattgtttctcaattatcttagtgagtttcgttggcacagattggcagcaaacggttcagcttacaacctactagctttcgaacgacatacgctccgtttccagtattctttgtcattctagcgtctgaccccctcggtcggttcatggcacgtgtactacctgcctatagggtgccgttgggaagattttcgttctctttaaacccgggcccttggtcgaacaaggagcacgcaattgttggcattgccgccaatgctggaagccagggtcaatgggctagtaagggatccaatctatcttgatatgccagaattactgatctcaaaagcctttctgcctacaaatgctgtcttgtactataatatcactatgaacccagcagttgccttattctttggatgggtaggctcattcctcgacggactaaagtaacacgctaatttcagacagggttgttccttgcttggttttgcatttgctgcaatgggtaagtacttttggtatctgttactgaataaaaattgacctgtctagttcgcggagtcttgatcgatgatcccgaattcatatttcctctgtccttgcaacaagtgactctataccgaagcatggatgccaaaaacagacctgaccagaaaagagcgcgggagcaggttaaggtatgtatcctctcagtcatgattacaatcctttgaaacagctaattgaatattgtcaggtattttggatattactcctcgctacatttgtttggcaattcctaccggaatacctctttccctttgtggcatctctggctcccctgtgctggtttgctagtcgcaaccacactgtcaacttcatcggagctgggcgcggtggcatgggattgctaaacataacccttgattggtccaacatcacttcggtggttatcacgtatccctacagtgtacaagtgattatcttcttggcgtttgtcttgacagtaagttaaaaggtctgtgtcaaaaggttgtcctctgatctgttccagtgttggattctgattcctattgcgtatttcgggaacctttgggggtcaccgacttttaacatcatgtccaatggggtattcatgaagaatgggacaacctatccgttcaatgatctaagtgggtatcttgctatgacatttcgggaatatgctgattattttcaagtctacctcgattccaacggcatgcaacactttaacgagacgaaatacgatgaagtaggccttgcctactctggagctcagtatacgtggcagatgttcatggtaagaattccgcattgttacaccccttcttttactgacattatcgcagtgggtagcctcgtatatgtcgtcttttgcttggtgcggtctgtttctaggcccaaagatataccgaatgtggaaggccagaaagcaggcaggatcttatcaccaggatagattaaggtatttacgcctggtgcctatcccatataggaatcctgttattgaccatttttagtcgcatcatccaacggtatcccggtatgacgaagtggtaagatcctctcgtccttctttacgattataactaaaaaggatggcagggaatgggctgcgcttactctgataccattcctaatgcttctgggtgttgttgtttccaagacagtctacatgcctatctggacgtactttgtggcattgggtttcggtgcagtatcgatgttaccgatgagcttcgtatatgcgatgtcgggcttctccataaaggttggatacttcaacgagcttgtttatggatgtaagttgatgtgagcttatgtcccattcctattccaactgactggactacttctacagatatgatcgatgcgaagggctcatcacggcacccattgggccaacttgcttatcgaattatctctggaaatgtgtggtacgatgctcgtactgttctagaagatcaaaaggtttgattatcgacaatgtcattcatgtgatagaagactgattattaattccagattgggcattaccttcacctacctccacgccaagtcattggaatccagattattgccaacatgctcgcactgccagtaaactatggcgttatgcgctgggtcatcgccaccaaattcgactatgtcagcggcaaggagaaagaccccctcggccagtggaccggtcaagatttccaatcgtacaacacagccggcatccagtatgctctcgttgggcctcgtaagctcttcgcttcggccttcttcagacccatcctctggggctttcttgcaggcgcacttgctcccggtgtgatgtggttattgcacaagaaattccctcgcgctcgtttcgatctgtggaatacgactatattctttgcatcagcagcagttttctatggtaatctcagtaccgggccttttacaacctttctcgtcggcacttttaccaacttctttctctatcgttataggagggttttctggaataagtgggcttatatcagtggtgcggcattggacactgggtttaacgcgaatctattgtttatctttatcttcttcgggacaaccgggaccaagatggttcattggtggggtaacaacgctgatagtatcgagagatgctttgccttgaagggatagggagtattatggtgacttatatagaacgaagcaattaggcagctcactacttgaaagcttgctccctgaacaagccccctgagcctgtggatgctgagctgcatccatcagattatgtcctgagatcacctgatctgtcaaaatatgaagctattcagagatcgagcagcatgaagtgattcaaattaactcaaccaccactaatagagataattcaattctggacatgtcatttaatgctaggtagcagagaatatctgattaattaaatgcgaccgatgtttaatactaactatggttcaattgtatgaagttggagtgaaatctacagattagcgacataccgcacaaacctacgatttaattttgatcctaccaattgagaaaacttctcttaacagatcagctgatctctaaatagcttcatcttgacagataaggtggtctctgaatagcatcatggtggtagttcattattcatggtctctgaatagtggcagatcgggtgactcggtgagggattgggtaatatggggctgaatataaaacagatcataaagtggcgataccgtaataaatgacactcgtattgaaaatggtgtgccgagagcgaccttcctaattaggttagacaactgtggtagtagtgattttcgactacggagtacaacatacaatgttgtatgcccacaatctgcaggacccttctcatcaactatatgcattatatatttctctcaagttgtatgtcgagtacatacgaccatagggtgtggaaaacagggcttcccgtccgctcagccgtacttaagccacacgccggtgagttagtagttgggtgggtgaccaccagcgaatcctcactgttgtatgtttttgttgttattatatataggatggggcgatgttatgatattgtgaatgtttaaagtatttcaaagtgctagttttaagtacggaatactagtttagaaaatccataagcttccgtaaccagataaaatctccatcactaataatcagatttccaggacctgacatagttaatcctttaagcctgataaatttaaatactagtaactacttgctgagggtttatatggcagaattgggtataaaaaggcggtaacttactggtagcctagaataaagaaatccacttagtatagatgagccccgcgttagccgcgaaattggataatcgaagaattagaaaaaaattccactttcttcctcctacttattatatgactttcattaatatgatattacaatttttggtagggctaagatttcacaatatgttctaggctataaaggtgtgatacggagactctgggccgggtgggctttgccgatgtctacttacacctccctaggccaacgtaggagttggcttaaaccgacatgctaccagatatgatacggagaggatcgcatggtttctaataggttaggtgagccgactaaccttggaagtacgatctagtacaggagttaggagtacccaagtgtgcagaatggtccgtacgggaccgcatgggcacgtaatggtcacatgacgaggcacatgctcgcacatgatcacatgacactgcgtagttaactaggtaagcgtcaagtaagaatcctaggtcgaatcttcgagaatagattttactcctattttttattttagtttctttaagctaataggaatgatactcacagggaattttgcgaaggtatagttcttattaccaatcgaagcctagtagaatgccaatattaagcttgttatcgatctacagtctatagattattctatacagtatattgtacaagctcacttttttcaacagaagaatttcgaaaagtatatagcagaaaagagcaaatagttcgaaaagctatctactataccaatcaatgtccaccttataacgataaagataagctctataagagtgagtattacgctcatttgataagtgtgatcagtttgattggtatgtgctatttgtactaggatatatgtataagtataggtaaatcagaagggctatagcgagtctacagggcgacaaagccacaataacgaattgaaccgaagatacatcatgtcttctagggctatatatagatgccaagtatcgaaatgtttccgtttcaacttgtaatcgtgtcactttagaaggtcagcgcgggcgtcacactacctagggtgattctcaccctgtcctatagcgcactcacccttctcacccctggtcgtgcgaccgtaaagcggcgctcacccaattctcacccagtctattattattgcactcggtcttatccaaaatcaaattctcttgttctattaatcccaaagtcagggttgtgttcgctcgcttcctatcgagcggcgttcttaggccactcttagcagcagcaagtgctctcctgacggtagagattgttacctgtgcgccaactcacgaaacaggagacccgtcatctcatcggggtagagactaggcttttccggcaaacgatcgcagagaacctccaacatcagtgaggtagtactacgcggtatactgctcgaataggagagagctctggtattaccgaatcgccgcaggttgctgcggatagtgttggcagaacgcgggctacatccggcggcctcagcggtctcagatgttgtcagtgatcaagatcatatcgcaaatgaattctcgagtgggaaggggtgaatttggcgccattctccctcgtggttgttcatctgctggtcgggctaaggtggtgtaagttactgcaactcagaagcagtagcccgattaggccggttgtcgtgatggtcccaaaagccctcgtattcggcactttagtctctagtaatgtagatagcttctttcttccttatgcaactcgagatttcctggaatactctattgcttcatagtagtcctctcggccttactcctctcatccgtttttggaaccttcagtccgcttactgacattactttggccatctttcataacttatcatccactaagtttagtccatattcccgaaagtaaaaccacatgcaatgtcttgggccacacattcaaaatgttaactagccctaaagaaccccccaccaccacctcatgttaaactacagtttgatcgtaaccatcctattctcgggtacaaacaaggattatgccagctttgggccactacaaggggttggtaaagtgcatcaaacgaatcagagaacacattgaaattagaagataaaagtgtatcccaggttctacagcatgaacacaaccaatatggaggctccccagtccctaaatctaccatgcactacagctaacgtgcagatgaatgacttggacccaaccggcttccaacgaatcacccttcatactcttcaccgatttatctaataatgtcgaccctctacacaccatcagagatggctttacaggagaaaaaagctgatcagtggtcaaccgggtgcaccgacatttcgccctcgtacgtgttaagtgtgcgatgaagtagcaataaaaccgagcacctgggccctgggcacaattctggtaaacaatagcgaacataaatacttcgatggctcctggcattccatgctttttttctgaaggctagttttgctcttcattaagtctcatcattactttgaaaaggctctgcaccagcatgttcaagctggccctatcccccgagcagccaaaagccatggctattcaaacccacatcgacggatctttgtcttctgtcttcatgaaacaatacaagcagaacgagtatgcgattctggcgagagccgtggccgatatgtgccaacaagcccttttaaaaaatggcataccccataagacccagagccgcgcgaaggagccggaaagcctccgaaaaaaaattgagcagcgtgagcgcaagaatggacgatacaaaagtctggaggatgttcatcacgatatcgtggatctcgccggggctcgcatcattcttgaaagatgggaagatcgccattttgtcaaggagataataaacgagacgttcaaagttcagaaagaggagttcaagaacgaaaagagtggctatgaagcagtacattatcgtgtccactctaagcaaaatggatggcagtgcggtccccatacaacggaggagccccttgttgaaatccaagtccagtcttggtacatggcgcaatgggccaatgttgagcacgatgctcagtataagacatctaagggtatgagtcgagagatgagcaacagccttggtgtttggctccaggtgtctaaactgaccgaattccttgccgaacaaaccaaagcattcaagaccaagcaagatgcgaaggacaaacgaaagttcaggagtaggaagcacatcggcaactatttggacaagtggttctcggatgatgatgggaatgccgccgactgggcaaggaatcagaaagagatgggatcttccaccgctttagaaatatatttggatgctcgtggatggaagactcctgagtctctaaatcgattgctctgcgagcactttggggccgaggcacaggatgaatactcagacgttgcagcaaaatatgcgggaatcgacttgaaccgtgtaatctatctaatggaccggatagtcctgaattgcggagaaaattgttctggggcctttgaaatccccaacaatcacgaggtacatgcctacaagatccaggtgattttgagtacgttcatctggatgaatcgtctctttctgccaacctatgggtggcagcgtttattcacgcgcattgaggaccaaaagaccgtgcgcgagggtattctcttgcttggaatgagcgcccggcagaattttgcggaagaaagctccttagccgatgatgaggtcatcaagctgaacaggttgtgggattggttttatgcaagtcgtgatcgaccgatcatgttggctttcacaatgtcgaaccagggggctattagagatgttcccaaagagaagaccgatctgcgaaatgcccttcggccactgattgcggccttgggtcggggtggggcttgagccttggcgttgacggccagtgagtagcagagccaaaaggtggagattaaagtgcgatgtctgcaaccgccgaaggttgtgtttttcctgttgtcttgtggcttatattcgtttcagttgacaagatatgtccatcgacagtcaaaatgctgcttataaatctctgcaacgattctgttgattgtttttttagcaaatggtggaaattaaaatagccaccagctctcggaaggtttgttgagattggtccctgcagttcctcacatcccatcacacaataaccatgtgacctgtcgatttcgagggcgcagtaacttcacgtgctagtaaacacagccgataggtgtccagaaaaaaagaaacccaaatgaataaaagatgagctgaagtagagttatcgctatgctgtaggatgtcaattgcgtgcaagtgtaaaaggtgctgatcttgaccacatcaatatagccaaagcccaacagaatcatgtttcaggctaaaacaaaacaggaggcaaacaatgatatgaaattggtaatgccgagatacacctgtaagtgaacatgatacaagcgtattatgatgaaaaataccgacgcgtatatttggccaggcaacctattctgcaaagtagtaatttcgcacatcaaatgaaaagtcgtcttttactgttctctgacagtaaaacttcttgaaattcccacaaaggttcgaatttttggactagcagtgccgtggatgcagttgtgacgagtggccatgtgtttctcgagttgggtgagcttggtgaagcaggcacgaggccgcagaaggtcacacgagaagactgcaagagcaatgcagggcaattcagctatgacgaggcctcgggactcaagcccagtcagaggagctgacacgactcaagcagaaggtttgattaatcaccacggtgagatgattattggagacttgctgacctgtcattggcatagggctcaatgaaattattgaacacctccgatttgaggctcttctgaacggttcccctccgcatgatatctccgaaggtcaaatcaaaagaatgaaggcaatactttcactggtggagaataatggttatcttggttcatcaacagccaaccgagcccttgacttttggatctggtgtgggcggatgcctgggcggtgggctttggttccagatcaaaacctctgggaagaatttttagaggaggacctgttatataagtctaaaggtcagtgcaatttcagagcaaagcaaggagagcaggggaggtacagagttaaaattatttttcattttcggttcaccaacattcttctatccaattagtttttgggatagggatctaaccttttacctgagactgatggagctaaccttgcctagatggctcaaatgcacgaacgcaggaattgtccgggttgtccacgtggatatctcccaattttggtgtcagcagaagacttgaatagctactcaaatgccacgccaagctcaatggtgagtatcagttgaaagtcattggtataccggaaaagttactgacatagtctaatgatcctaaggacaactcccgaaagagaagtcttgcagactccttgtatggaatacaatccaagaatgatggcaaagtggaatacaggtcggccaggaacatggtgggtgggagggacatatgaatggtagcatcgaaaagaggggtcacatagcaccccttgctgtctcatgcaggaaagcacgcagggcttgagaaacctcggcccattggatattcgcgtagaaagccaagtgcaagcgctttgtccgccgaaattgttacaagatgtgtgcccgtgtgccctatgatcctcccccctctcccccaaactatattagagtttggcttagtttgtaattaattcgctccatatttattttttgtcttcgtcaagcctctctacgtccctttgttccttttttttttgaagcctaacctacagaactctacgttcggctttaggtcgagtgttctagagacacagaagaaagcaagaagcaaagaaaaaccgatgatacgctatatgagtctcaaaacagatggaaaaagagaaaacgaaaaaacggttctatctaccctgatcccgtcgcgtgctcactcgacatgggctttgacgcagccttagtaggagcgcaaagagtttccgatagcgttgagtatgtatattcttagtataaggaaggctcaaccacttttgcttattggtggtcattcggtgtccaccacgttgatcctccagctcctgatcaccttttactctttggatgaatcacaattaggctgtccaataagcatttctcttcaattaccccaactcgtgaaaagtaattaagtagacgccagagtacagttcctgtttactttctacaccataagacttctagggctctttaaaaccttgatccaactatacagtagctgtatctcccccgtaaagtataatgatccagtgtacgggctgtgagaacgaatatgatagaaaatcgaaccctcagggtgaggttggcgcgtagcatatgcttcggcgaatgaagctgttaaattctaggaataagattatattactgccccaatagctgcggatactaaaccgaggcgtaataaatatagtaaggtagacgtaggtgatataacacgtgagtatctcttgtgccgtggctgacaggccatctggataaggtatcagtttgtttatttttgtgaatccccgccgaaataagcaaatagtagaagatcgattctcgggtttactgagtcgtgcctttcctccacatcccttgaagcagctgcaatacaagcttaataggaccagcggctcatttgctatgggtgttggagaaatattatgttctatagggtggccccaaccaaagtagaacatggaagagcaaattgaccaccactaggaccatttgggacaggcttattcatcgttcacccaattccccctagtatttgtacggtattccgggcacgttcggaagtacggtgttgcaacacgccgaagcttatttgtatagacccctgagatcattcgaccgatctttaacacctacaatcaatcacctgattctattggacatgttcagtactagccagtacatcaattcctcatcctgacagtatataaaaatcacactctcaagtactcaattggctatgcccatactagtccgtactgtaacgaccacgtttcgacaatagagttatgtgggtcacgacccggtaatatagatacaggtctaacctagatacaggtctaaccctaatgcatgagtagtgcgtatcagggtgacaggacaatcccatcagtacaggggatccaacaccccattgagctatttcaacactaggctgaatgaggatagggttcagggggtcatgggtgactcatatcatcccccaatgcttgtcaaaccccgaaacaactcaggccaacatctgactatctgttattattgccaagatgctggacagactcccactagaaattttgcacatggttatgcaccatgtgagatcttggaacccttcgcaaggtctgacacatctgacagttaataggtgccaagcatcaaggacctcgtgcttttgtctgaggtatctaaaaagctgcatcggatcgttttgcccattatctacgccaaagtgtacatcccagtacccgagcatcacttagaccaggtgacgattagtcccatgaagacctgtttcaagggagacggatccagagataccttcaatagtcttgaattcttgaaaaatgtgcaactggtcgctccattcaatgacctcagaaggaacaggtgctaccggggcgaagtaccactcctaccagtcgaatatgatgactatctcggcgacgaggaagagtttgacatgtgggaagaggagaaaaacagacgacgtcctcatgacgtgatgatgactaatcttgccaaagcactgaaagaacttctctctcatatccccaaaaatactttgagaggcttttcgtatgctctttttcaccactcatttaacacaagaactgtcgtgctaacaatccatagttggaatctgggatgctgcgttcctgaccaagtatttggtgaagaaggttttctgaatttcgaccagaatgcaatccaagatctgtcactgattacggacgggacatgtccaagtccggaatgggagcatctcgagggtctctctgacctccggcacctgcggcgcttgtcgtggaaaggtctaaaccccaaccgtagccaaatacttcttcgtcacaccctgatggcgaattgtgcacaccttgaatgtctagaactagagccgattgggtgtggagaagtttacgtgcacgttgaagaaatcattggcgacacggatgtactaagggatgtattccatttcaataatctccgacatctgtctttgaccaaggttgcgctcgctgcaccgtgtgcacgaatggcaactacattttgcatagagcaattgcaatcattgaaattgcgtgattgtcaccaaacactggaatttcttgagggacttacggagtcatctcacatcatcaaactacggtcatttgaggttgccatcgacgaggaagcgtatcttcaaacttattacgaaagcaacaagccacatccgatcgaatcgttcctgctgtcttttcagggtcttgaagaactgtcgatttcaatttcgaacacgttccacccggtaaatcctatcactgaccctatctgccaccatcgagacacactaagacggttggtatatcacgaggaggggaacgagattcacagggaaagtgaaggcccgcttgcatggaaactcttcaccaaccgcatagttgagggaatgaatttggagtgcattggattctgcttatctccttctcttctggtacggctggctttcccaggtcacattatattgtttgtctattcttacacagccttcttttcagataccgaggcttggaagaagcatcgcggctcaaacagttaagctcttgcattttagggaacctggatctggatgtgtgccacacaccaacgctctgtttgagtttgcgaactgggcatttggtccacaaggacttgataatctcttgatcattgcacatggtgatttttcgcatggtaatcggtttgagcggactcagatccttatgggccgtaattgtgagcaatccagtggatattttcgggtcatatctcgagatcagcgcgacttctggctcaatcggattgatggcgcacatgagatgttgtgtgtttgtccacaggaggttaccttgggcgccgggcgtaatttgtgggactcggacatggaggtgaattcggacatggaggtgaattcggacatggaggtgaattcggacatggaggtgaattcggacatggaggtgaattcggacatggaggtgaattcggacatggaggtgaattcggacatggaggtgaattcggacacggaggaggattcggacatggaggtagatttttatgtcgaaatagataccgatagctcaaattcggactaataaaaaaaattcttgaccccaattacgtcggctcctcgatcaagcccacaaagttctatcaagacgtgaaaggatcgaatcccggagcattgtccctacacaccgatcaagaaaagtgggcgggagaggtttcggtctacactagggagatcactgatgcagactttgtccagcccgcagcattgagggaggttattggccgggagcctggtcaccaggataggcttattgacaatctcgtttccagtgataagggtgtaaagtacccccaattgcgcaaagctgtctatagtatgtgagccttactgctatattcgaagagatccgcccactgcagtgcagtcttacactaacactgaatataggcctttttagtcgagtcaacaaggaccttgggtcgaggttgcaagagcgtactgaagcaacaatcaaggccgcatgagatcgatctccttctctagtatctctgctgctctaccaacgtgcttgtgtctttggaaggcaattccaacgcgattggatagttttgatatgatttgtcttttatggatgataaatcgacagtagcaatacaatctgataattggctcccttatatgactaactcacacaatatttgaattttctgtttttcttttttttcttttttttctttttttcttttttttttttttttttggcattggtcgttccacagaaccattgttgggcaaacgacttggccgctgattgcactacggagcgatgcgtgtggcgaatgacacaccgcgattggctaagaaccaatcttctattagataagtcttgttgcataacaccacatgcagccaaattctttggcacataccgccaccagagcccagtggatttccgaatcgcactttagataatcgagcacatcatgttctccatctccacaggtgaagattccaaggcggcggggctgctcaaacactggtggcgggcggggtagtacaaagcgcgtatttattggaagaacagggcgtattccattgccaggctgctcacccggattattcaagtgtggactacctgtccgcctttaatgcgttcctcgattggctacgagttctcttaggctagcagtatggattactattgcggtactcaataatgttgagaaaaattgttcacttaaacttttggtgcaaatacaagtcctgagcaatagagttgcaggggtgcaatatctgaaacttgcccattttcaggacgaaccgctttgcatctccaataaacgaatacacctcgtgatcctagtcacagtaacagttggtgtgtaaattcatacagaaactgcatatatatgactcacatctgtaattggctgcgataaaaataacccagcctcgtctcgatttgactacgatttaaatctccttaagctctgtgagtccgtgttccacgtactaacccgtttaaaactaatttgcttaccatagtcacttgattcatgaggttctctcaagtgttgtccttcctagctggtttaggaatggctctggtcgatgctaaaagaccctctggaagtaggtaacatctttcgcgctttatgaaccatggctaaaggtagattacaaggccattgcagtagctacaaatcctgtgtggactaaagcttagagaattgtaaatcgagggatcgtcggtatgtccaatgctctatactcataacgtaacctaccagctagccatattaaagctaaatgcggcttgtccttattacgctagtcatcccgttctgtatttgacatgccatacaaaaacgaacccagcgcgaggaagaaactgccgacgttccaagccgtgccccattccccaaaggtgagcttagcagcaatgagagcagagaaaagtgaagccatcgtaaaaattatcatggtataccgggacttgatctcccaagcttcctttatcaagattccacggaacttcatctctcggagttttgggcgatgccactcattcatcatcatgagaatatcactattgccctaagattaatatacagacaacaagccaagcagtggttatctttcatgaacacttacctgtgtccataaattaccttctcgccctgaagaaagtcattcaaggatgcgagcttgggattagaaaatgcaagtttcataaggggacgtgtttcaaggttttcaagctgtctttcggcctcgaacttcgttttctcaggacaatccacgtctatatagtatgacgcacaggtttcgaaacagtctattttccctgtggatagattgtatgggcatgggtattcatgttcctgataattttcaatgatgctttgcagtctccttttctcgacttgcaagtccttcgttttatacattccgacaaactccacagctcctccggggcttcgtaagttcatacccgcaatagaaatctaagaatatttgtcagcaaatttagtagaaaactcttattctcggaacagacctcgactagttcagcgcttttgacaccaggaaaaggaatgtatcttctccaccaacatctatgagagcaccatgcctgcctgattgcttcccatatgatagtctcgtcggctgaatctgagactgtgactggcctaaccgaacactcatattctcctccccagcaaagaagaacacaaacattagcgccatctccaagcattgcctgtaactcagtccccaaagcatttttgcgagatgtgtgggcagcttcacggctgtctctcgtagtggactcgaactcaaagtccgaactttgcacttctgcttccgccctatgtgaatttctatatccacgggtatcaaggcgatggggtcgtatcgttcgacctgcaagtttttgtggtttcgtttccagtggtgaatcttccctgatgcgggcctggcgggtatgatgggcaattgtaaatggcaaagaaggtatttcgagtataaaatatgacaaggttctctgaaccagggtaggatatcgacgattatgatctcgcgatgttggaaaataacctcggttgaagttgtatacaggttcgtcgggtacggcctcttcgagacgactcggcattaaatgagctctttccggcaccaggaggttattcatttctgcgctaaaaattttgaaaaaaaaaaccttaaatgtaagccatccactgttggaagtaaggaagtgttgataaataagctatatcatcgcgaaccaacgatgaggctgagttatttaccccgcaccttcgtcaatcttgcaggcgcctaacgtgtgccagcaaggtttttgcagcagtattaatacgatggctgataaaactgcggtcagattatttttgggcaacctactatgaatctgcggaccacagcccgtcctataattagaccggccccagcgtgagatcaaccactaccctaaccatgctctcgaatccgtgggctgtggaaggcaaagctgagcctgtcaagtccaagaaggccacagccgccccatccaggttcgtagaatgcacttatcattggctcatcgccttggccatatcagcctcgcaatcagcctcgcaataatcgatacgctagatctcatgcctacatatctgagtgcgctagtttcagattgcaggcatattacttaggatgcggtgaccggagaacaatggctggattgtttttccaagaatcgatccctaatttatccgtagaccaagatcttgggtactatttgtgtcacaattttactccaaaaatgagtattaggcagccgtctccctgcaagctggattgtagggatcagttccaggtttctacggtattctgatagatccagctgtcaaattgcggggctgtgaataggctaattagttggaagaaatgaaattgttgaggctatgatggaattgctattatggtgaccttaagcagtctaacactatggctagaagtgctctgaagtataaattatggagctagacatgaatgcatgtgatgatgtgcataatcctttctgaagttcatcgtcacctagagattcttttcggttctctgaactggtgtaggatagtgggagacctagtagagtgagctccggtaatgaccgatatttctttcgaggcttactagttgagaagcaaagaaggaccagaatcctgatgtatccgccgggaaataaaagacgagacgaagggggaacttctaccaccgtcgtttgttgcccatgccggcgataaaggaaaatataccggcctacgtcgtgcgacacggttccagttcctcgatgaacgtactgatattattggtagtggagatttttgtcgcaaaaacccctgcgacactggtttttgcgggcgagagctgggtgacaatcataccttccatccaatgcaaacatcccaaataatttataactgtttttcaggaacgaaggggcatcacgtatcattgagacagttgggacaggatcgatactccgtgcgaaatggtgtgcccagatttgtagtgagcgctaattggcccgtgagataagtcctgtcgagtgtgttcagctgaaggggtcaacgcagtcagtgatcgcgcgacgggtgattctcgccctgattctcgccctgattctcgccctgtctatagtgcactcacccttgtcacccccggtaaagcggcgcacacccatttctcactcgggcgacacccaccgaactgaactatttaccgcgcttaagccgaacaccggcagatcagtagttaagtgaatgattaatttatatttcaatcagacacctcttccactttcgttgaaagtctcagaaactcggtaaacagtcttgtagaacttacagtcaccgaaaaaagatgttggaagaaagaaacgggtaaaggaaaaaaatgaaatgtatcttcgttggtcacaacttcaaaaattgagtgtttgacaacatttggccaagcttcaacgggttgacaggtcgagcacccgcacatcctaccgtgacctcctcgctttctgcagtctagatggacagacccacacaactcaacacaaccagcacaataaggccaggaaatcaagtccatcatttttagggatggaattgtaggcgcttttcggtgattcaaggttgagtcgctcacaaatgagatgatcacaacacgaaatatgagctctgtcaatgcggattgcgtatctcccacaaggtctcaatttaagagggccgtgaaggattcaacagtcagccaatgcttgaccgactctgcatcccttttccccaacgccactcttactcgtctctcttgctgagcacgtaaacgcatcaaaaatgtcgctgcaaatggttgctgtaaaagaaagacgtgggtttcaacaggcctcaatcaagagaggtgtccttcaacgcttcctaccaagttggtaagtgaagagaaacctatgaatacgtcctctacccctgcaatttgctctacgatttattcactcgattctgcaaagtcgagcaggcttgtgtctgacgcactcgataagttcttcccctttgatcgagtactggaatttataccgtactaacatttatagtatacatcgtagaccagcaaatcagacagttccagtactgtaagagacgtgattccaagcagattcactgtcccattcacgccagccgatcgaagatacgagatttggattagctggtcaaggtgtctatgcgaagacgtctctgctatagcgagctgatctactgtcgcggctccggttgaccacagatttgaagtgcaactgctcacactgtaggtatatgagcccacaagtccttcaaactgcactgacccgaaagacgcgggacaaccagatccgtggacgttcgaccacaatgcaccagggcaagggcaacagcttgttgtcgtctcttcatccctggtcttgaccatcagaacatgtgagtcgtggaatttcacgctgatgtactggctaataattgacagtgaacctttgggggctcaccagagcggccctgttaaccctgcagcgcatgacgccaggtcgagcggggaacggaatccgacagtcataacaaggagaataagatgcatccaaagacaaaacagcttcacaacgcgcgcagcgaacacccgacgagcttgcaagaattggaacatggcaacgcaagcaggggcgtgtttcaagcacaggagacagaaaggaaagccgacaagcaggacatctcggtggttgaatggctgcagatagacgaacttggcgcccacagtcacagcaaggccgattagataacattttggaacaaggagacaaaagcaacaagaggggcaaatacaggagagaacatactgactggaaatcgtggtggtaataaacagcacgacgttgcaataaaatgaaggacaaggtgcagaagacgaagcaatcatacctgctcaacatgcataagtatgcggagaaaaccctagaaccctaaagccaagaccatctaatccgaaaaaagcgacaataatgcaggtaccggtgggcaggaagagcgaataagcgacgtgcgtggcagaacagtccatacgtagttaagccacctctttttgcaccgtctcgcgcacacgtacatccgtgttgactattccctttctctcacttccttcgtttcagggcatttcggccatgtattatctcgtaatttcaatacgtctgacacctctattcccctctcccgaagcagctttcctcggtaggcgcacttaacaatcaatcgcgagtggtccaaccaaagatggctccaaaccttgctccttccaagcatgagcttatctacgacatgatccacagtggcgaacgatctatcactaagatggcactggccgctggttgcaacaagagcaccatctggagaatctcttccaatataagaatgtttggcaccgtcaaagcaccgccaattaaaggcggacgaccccgtagtatcactccactcatactcgaggctttatgcgaccatctgattgaaaagcctgccttatatctggacgaaatggtgatttttttatgggacgaattcgctcttcaaacaacgaaatcgagcatcagtcgcgcccttaagtccaaaggctggtcaaagaagactgctcgggtcaaggcacgataacgcgaccttgaccttcgggacgagtaccatcattttatctcagacttcaagtcttaccaccttgtctatgtcgacgaatctggatgtgataaaaggataggcttccggcgaacgggttggtcccctcttggtactgcaccggtccaagtgtcgaaatttcatcgtgatcagcgctatcagattctgcctgcgtatgcgcaagacggcattgttttgtctcgagtgtttaagggttcaaccgacgcctccgtctttgaagattttatcgagcagcttctccagcactgtgggaaatggcccgagccaaagtctgtgctggtgatggataacgcgtcgtttcatcactcggacagaattaaacagatgtgctcagaagctggcgtaaagctagtgtatttgcctccatattctcctgatttgaatcctattgaggagtattttgctgagctgaaggcctttatccggcgtaattggcaatcctacgaagaaaacccagctcaaggattcgataacttcctcgaatggtgtgttgacgttgttggtgcgaggcagaagagcgcggagggacattttcggcacgctggcctagctgtagagatatagcgctactgcggcagcagggttcgggactaacctcacgggcaaactagaacggattcgtttacggacattattgcgaaccatattgtattctgggctcctgcaacattcggatatacgaactgcatatattcttcgacatgtcaatgtcatcgtaccaatttctaatgcactgacagggtatctaaccacccgccaagtcgtaagcctgtaagatatcccaaatgtgtcgatccgtcttctctgacatctagctcctccatatcacgaaggacccgctcaatatattcgccagcgccgctaaggttcataataagtgcaatggcgcggtggacaccgagaagccggggtgatggcggatctaccgtgcgatgaggacttagggtaagcgaccgtgtgacgggaaacaaggggtcacgtaagaaaggactgcgttctgtcgagtcaatcctatactggtgtcgtgtgccagtgcgttcgaaatagatcttgaattcgccgaatagccggtggtagtccagcgttaaagtgagggcgttcatgggactgtcaattttgggtccatcaataagatggattattccgggatcgaacatgtccaagatccgaagagcatttttctttgaatcgctctgtgcataacattagcaccgtcaaaataccaatcccaataatcgggcataccaaatcggattcaccagaagctaccgtcgtcagacaatgagggagaatgtgggcaacctccaagtattgaaattgatcgctggactcatccttcaataggtttccgtcatcatcagcacaagattccgaattctcctcgaaccgctttctggcttctgctctatcgaatttccgagacactacacagcggtggcggtcgcgcataagacatttctggcgcaaaacagatacacgttgcctcgttccggtcggtgttgagctctgcagcgatgataacgacgtgggcgttggttgtggtgtcttgactgatgatgctctaactataactgcgaattagcatatactcactagagatcaagcatatgtatatgtaaggaattaacgaacggggaaggagaaaattttcaacgataaactcagcaaacttttccaggactccatgaagcttgtttatttgttctggttcccatgaagaaaatccctcgaagaataccaaggcgtgagtaatctcagaatcaacggcatgtccttcatcagaacgcaggtcctcatagatgtatgtgaggaagaaagtcataaaggtatccggcgatgtaacgtgctcgagagtagcctggataagtgccgcaggccgatagcccttccgcccggtcttctcggagccataatgctgtacaagcgtgatcactaggttccttgccgactcatgctgttgtggtgttaatgataagggtattgagaagtccaaaaccccctctagggaggactggtgacggtgagtcgccatcgctgggaacttgcgagccttagcgtgaggggcgagtaagatggtggaggaggcatgtgatgagctgactcatcacgggtcaaggtcggcccgacagaatctccacagaacgcaaaggtagcgaagtgcattatacgggtgcactaataggatcggtagcaggcttcgagtgggaaacttaatcaagtcccaatattggcaaagaaacaatatggcttaggtggatatcttctacaggcggaaaactcacatgctcctggtgttcaacggtgttttatgttcaacgttgatgtgaacgttgattcaactttctgacatcattcaccacccgtatatcgcccaaggtgctggaatgagaacactcaaaaaatactatcaggtcggcacagtaccaacaaattatgacaaagaagttaaagtctccagagctcctggaagctcaaaacagaccctcggccggtcggatctttatcgtggcagcgcggcgcggctgaaccatcgccctctaacaacccccaagtcgtgagaaatgggactcccttccacacgccctatgagcaacaataatttggcagccatgttcctcctgggaatatgccctaaataaattggaggctcgagcatcatgtggatacagcaactggattaaaatatccttgattcgatcgtgcgtgtacgtaccactattgtggccatatattgacatccatagtcctcctaggagccggcgctgataataataacccgcaaaaccttgactgtggatggtgggcatgaccgcttcagcccgaaacatttaaaaggttataattgtccttacggttgatgctttcttgtccatcttttgctccaataacttgccagtacaacaccattactaacgaagccaatcaatcatggattataacctatcacaggttccaaagaagtccaataccccagacacagaaggccataatggacgtatatgccaaactggtatagttattttagatccccttctcgaggaatccatcgactaatatacctatttcatgaaggcaatgaattggctgaaaacttctgttgtgtcaatggtctattcatctacgggaatcgcagctatataagccaggttttacaaccgcctgttggctaatccactggccctgtagctatagaggcagttacttccgttggtacctctcttggtagctcaagggcctctacgttgtctccaagcgttataagggctgaaaaccaagacctgccccctctgaacgtgaaaaagagagcagccgaattttcaactgtcctacgaaagcgacgccggtatttatactctacctcataaataccgggccacttacaactggcgtatcaaaagagacccctatgccttataaaaattagtaggaaaatggtcaatggtacaatttaatacctataaacgctatccgaccgcatcttgatctgcgataccatttcccctagggagtgggccactatgtatctcgccacctaattgctacagagtaggtacgaagagatcatcgtgaggaaagagatggaaatagacgctgtgcccgattttgattcaccactaacacagccagaagagaagtgccggaagtgtgctgctgcagacgaggagcggctgtatgactgagacgtaccccgttctttttaccttgtcggctatattttgatagtgtaaccggtcatttgaacttgaggagcaattatagtgttatgcaaccgttaatcggcatttgagagcctgttgagctctaaatctatcagtatatgactaagggacttctaggtgcgaaggatttgaacggtttcctgtgcgatgtcactacgcttaggaataagaaagaaatgtacaaaaccagctgcatcttgatctccaattaatgtaatatattagagaaatcagatagcgtgtgcgaggccaattgcggatagtaatgaagaaatagcaatttcgtaagttaaattgcctcgaatgtcaaaatcagccactccttacattatttaacccgcttccttcgtaatggtgcaatagctccgtgccctacaagtatcgaaatatttgtgctattctgttaatcagcttatggctgctggtcctgataactcggcagtttggctgtcactttgagtctaaatgtcagcatattaatccaagtgactcattatggcattagttgtagactatattaaactgtagtattggtaagacaggtaattctagaacgccgaggcctaaaccagctgtgctagtattcgtccgagaattttgagagagcgactcgccctgctgaaaagcgagcttctaagccaaaggtatacctagccataaataagtctactggattatctctctttacctggctaatatggtcgttgcagcgttaactagatgctggtcgtatggaagttgcgagtgattattatatggctatgtaagtggaactctgtgcaacgtaataatcactggtaagtttgccactttatggacctactaattattgtaataaccatactatgtctgatccgatgcgctcgttgacttatgagcgaaatatgaggccgctattataaagaagctgccgcagactctggctcgcttgatagcttccgtctctttatttttggcgcgttgtcggttataggaaacctagaatctgtccgtggatatcattccctagcgctgttaagggtaataagattctgaggaagttgagttatgttgagtagtgcggttatttgtcgattcgtatggaatccttaattagctcgagattcatgttcgtgatggctgtgcagcttattgttagttggaaaaagatacatatgccgtcaacagtttgtatgtaagcgctgtggctcatcggccttatcttacgatagtcagtcgaagctgccatctcctatcatagctgagagtcgaacccgtaacaccgcgcgtataaaacaaatggaattccactttctctcttagttcttgcacattttggacccgagaaaacactgtcttgttatcatgttatccaacctattgaaagataacaatatgatatgtgaccttggtactatcaaagctcaatctcagctccctatttcgatgtcggcccccaccacccgcgagagtcatacggcggccactacgaaactaacagaacctcaccgccgcggtagattgaaggttgtcacggggcctcccaaaagcctttgcctaccccacttgtgtggcctggagaatatcgcatccgtcctgattgtaagacaggagtcaccgtgggatacctatcggaaagtcattacgtatgagaatgctggcaaagttacaattgccacacgccgcactcgcccgtctcgcatggtagccatccggacatacaggaaagagaatgctcgaagattgatttacagattcggacgcctagaaaacaggaacgttctctccttacatgaatgctacatgcacgaagatctcgcgttcttcttagttgacgacttgccgctgacgctggcgcatgttgccgcttttccatctgtttatcctagcgagacagaattgggatccattatctgccaggttggtccctcatgcccttcgatgagctgttctgacattttagatcctggatggtgcctgctacttatcttcatttggccttacgaaccaatcactggcctgtggtgacatattatttggcattgacgggatcatcaagataagtttgttgacggccgtatccttgcattatctgactaacatttcgcagcaagcttggacctttatatagattgcacgccaaagcaatccgaaatcgcatatattgtggctcttccgtcaatcatgatgcggctcatgcagaaatatgacaaagatcgcacacgtctgaaaataccacatatacgacgatagaactctttgcgtcgtatgtagaggctctcaacattacaacactcggctaactggatcactatactagacatgctatttttcccacctctaagagcatcttcaataaggagagaaatgcagtattgtccagggaaatgaaatatcgttgcagttgttgaaaaaaacaagtggcaacatataattcaggacaggcggctggcactccagcgcatcactcatgaggccgaaggtcaggccatagggatacaaaaatcccgagatgttttgcaaggacaaaagtctttccttcagaccttgagaggagtcatatccgtacttgaggcctcccttacacaccgccacccgccacccaaccaaaagaactttacttgcctatattcatatcttcttcttcccagacggggagacattttaagtcccgtgttcttcagttgagtaagacctacggacacttacccctcccacataataggttgaccaacgggttcaatagtatggttcgagaggctcactagcgggcttttacagtatgagccccggtccccaaaagcgcccagacttgcagcgtcactttcccaaagggggagtggaaatatggtgcgaatgcgtatgaaaatggaaaagagccgttcttccctcgcctttaggcagatacatgatatttctggtgtgcatcttctcagtttgtaccatttcatgctgacttacagacaccactctgaactgtcagacggacccagctttccctcatcttggaatagtgttggtcctcagtaaaaagcttggatgaagtacggaagacgcctccaatgggacgaacgcacggcatctggatccttgatcgatttagatctaagacagtagaagggcccctgcccatgcacctcagcctaccatctccgttctagaaccccaaacaagaggcggaacctcaaaaacattttgtcgccgataacatgccctgagcacgtcagttttatatgacagttccagtaacgattgttcctggaccagcggtcaatgcgtgataatttttgagcggcttaggctgggctgtaggcatcttagcggtgttcggatgatacttgaatggtgcttgaattcttgaaaatgatcatgagaggaatctatccattttaatactcgaaaggtcctttgtgactgaagatgacctattatatcttatggtcttggataatgtgggttcaatatgcattgttaatatctaaaagagatacataaagggtgtagattaaaacctccccgaccaccaccccaaaagactacatacactcaactggaagcatttagctttatagttcatcatcctctccgtcaaagtgaatattccatccatatgtcgggcccacacaatatgcgctcccaacgagcaacttggagttacaactgtccgcattcagggatggattcacttccaagaacaagctccaaggaatcgattcttgaacacaaatcgcggtgcaggttacttcaagctcctcattgctcacaacgtgccatttgccacaccgcagagttgttccattggcgacaggcacgtcatcgggcggtgtaatttccggaatggcgtaaccattggcatagtctggcgtagtcgtatccgtgtctggagcatcacccgttgagtttccggcctgcgggcccagacagatgacatgtccgtaagctacgtcgctgttcatgtgcaggtttgtacactggttgttgatccacgagttatacttcttcaaagtgaggccgtccttgtatccgacattttgggccttttcgatagaactgcaggtatcgcctgtttgaagagtatagatattgtcgcactggaaagggatgcagatcttcgtgcctgcgggaatatcgttacagtctctcaaattgacgttgcccatgaaaagagcagcagaggcgaccctgtgtgtctgagaaatcgagtcgcaagtgtctcctattatagaagtataagtgacatccgaggcacagaagtcggtggttggctcatagggatcgatgactggcgtcaaagggtctgggatatccgtgggcacagtgagtccgcactcggagttaatttcttgtagctgtgattgccagacttcactgtagtaggagtagggagtggattgcatctttttgtaacggtccactctgcaaaacgagcaaagctcgtcggttgactcgtcaaaggatgtttgtttattcaggacatctgttggcaaagtaatttgggttagaaatattgaataattcgcaaactcgagcgtgatatcgaacttaccaccgcaatacttcccagtatcggggtctttaacacaggactgattccacgacgcccagaacctacctcccctgagagtaagcgggaagttggtttggtcgacactggcacagttgtctgtgacatggtcgaaccacgacttgatggagacttcgcattcggcagagcagacctgcccagtgagcgtgtcattttcaaagccgccataccaacgagcaacttgaaacttttgggcatcatcagggcagtcgatcacttgcgtgagcgcggactgacaagatgacggaagagtgttcagcaagtttgcatcatattggtcctcatataggtaaaacccggtgaagttgcgtcggcctataatatcgttctcggcacggaaccaacctagcaaagaggaagtgtatccgttcttagcatctctggaccagatcgctgtttcaccaagggggctaattgattggacaattgcctttgtaacaagattgaccagccaaataccactgctttgctccacatggaaccctttgtcttgacagttgttcgtttgcaagcaaccctgagagtatgacctgaaccaactatagaggcctaggaaggaagatttagatataagcgcatcatcacaaaccggttcgaaaatatataaaacatacctgccccaaggatagagatagattccgagtccacaatcctcactgcccacgagctagtgcacgtatcgcaatcaacatcctcgggatcatcagggaatctcccaggcgtgaaaggttctggcattggaggactaggctggaaataaggcgattctgtttgaatcatccccataaccaagtcctttgctccagacagctgatactggtagaaaacactatgctcagacgctgtaccatacatccacgtaggtccttggctttccacaagaatgcctcgtgccacgtaaatatcgatctgatcctgtgaaatcgcgtcaagatcgtggtctgcaacccatgcccacatattctccatataagctgaggcttgtttggtaatgcgaagcaagagcgacccggcaatacaatccttacgcagtgaggaagctttcttgggacaattttctgcctggagatgggaccctatagcgccacccacgcggaaatgagaatctttttgatattagcaaggctcttggtatagggagtaacctacgtaccccaaattccggcagatccttgagtggattcatggacattccactccatgagaacagctcctgctgtaggcccagatgcagtaaacatcatattttgaatctcgagaattccaacatctccctccttgccaacttgaacagccacacggggattctccatatcctcaaatctgctaccagttgccatgatttgcggccaagcctgaccaattattcgggacccgagtggtacatgaatggtatccttaatcgtatagactccatagggaatatagacaaccgaggagatattcgccgcaaaggccaaaacactgtttaaagctgctgtgtcgtccgtgactccgtcgccctttacgccgtaggccttcacatcgaacacttgtccaccacccagatcgtaatactggggacggcgcctggtgaagaagttaaatgtctcaccagcataagacttacttccagttaacgaccttttgcgactgatagatggcaattgagtctgttgggcgaaatgaagcccagtatcgtcagcataaaggccaaacccccaagcgtcaaccatgacttcatctccgccagccaagagaggttcagtacgggtatcggcaataatggccttttggacattgaaaaagcccacgttctgtaaaagaactgctgtagagttttcctggtgtaaagatgtgcggataccggtcggtgtgttggctatgatagcatcaactaggatataagaaccaacagactggccatcacttgttggcccgccagcctagtaggaattagagaaatatgggaaaatagaaatagcaaaacggtactgacgcctccaacgacaacgattccagttccacacgactcgatgacgacatcttgcatcgtccatgcccagtcccagtgaacctgaaccgctgttttgcagttcacgaacactagttcgcttgtggtaaattgttgattaccaagatatgcgctgccttgtgtcagatggcagcttctcgggtgctgtgttgtctgattcttacccaaaatttccacccacaaaggtaagattgcccataaagcctccgcttccgttctccatgtagataccctttcttgcatcagcctggacataaaaaaatagggaataatggtgatgttacctgctgcgtatttccatctgcttgagacatatagaagtctatattctcaagagtggttccctgagcgacttgccaatggatagcgcagacgtaggcgttagggtcagtgtgggtaatatccatcttgaagttgcgaacactacgcaggaagttgttcgtattcagatacctgaatatatgtatggtgttagaatattttatattcaaagcatatatgctcgtcttaccattcctctgaatctgcaacatagacatcggaggtgatcacgcctagcccaacgaaactcgcagcagcaaggatagttgggtagtccatgggctataattggcaagaaagggtcagagccagttgaatcaatgatggaaaatggcaggcatcttacatcgccgaggaattgagtgttgtagtactgtataaggggactgctgatgagataggttccaggaggaaagaagactactgcgggatagatcgtactggagccacaattgactccacagcggccgccatccgagatcgccttattgatcgcaacttggaaattaattagagaaacaatttctctctactgtgagatggcgggccacttaccagtgtcatcagtcacaccatctccctttgcgccgtagtctttcacatttctccagacctgcgaacagtttaataaacttcccacgcggatataaattgagacttgatcaccttgtacccgcttggagcgaatgggctatttcctctctgttcgaggtttgccagccagtagttggaaccagaagtagcacgcttttgtaaactagcctgatgggggccttccgcaatctgatactctattccattatccgcaacgtactcaaatagtccattcgcatactggagacgctgcggaggcctgttggtgtcgttggactttgttccatattttgctcgaacctgtgcggacagggctgcctcctctccagtagaaggggatggtggtgaagactctgctagcacacgagcagcttcggcaagatcttccgggatcgtgtaagcaaagctcttttttgttgcggtgcttattttgtcgcggcgtttcgttggagaaccagagcgggaagtattcgcaacagaaacggaaagcttagccacggcatctttcgaataatccaggggaggggcaaactctcttctctcagagcctttggctgtatcatccagaatgtagttgttgaaattgatattgtcgatgcgcagcttattgatgactgatagcgcttccaaggcctcagagactttctggacagcagcagtatctccaaggtggttcatattagcggccggggtagatttcggtatagcagcatcagtggcagcaatttcatgacgtccataatgtcggtgtaaatgatcatgtttatggtgtccggcccatacagcagtgatttgacatacaagcataagccaggacaaggctgatatagtcccccgcattttgacagcaggatcttgagatatgccaccaagttttgaaactcttcttggactcagcgaatataaagagtggactgttgaaagataaagaaatcagacggtactgaaatgcaaactacccacggtgcgctttcgcaaaactgttggcgcttctaacccaattcatgtgggaggttacatcgcttgcaatagtcaaaagggtggaaatgagatgtcttggaatttctgcttagcgaattcaacgatccacatattacgacttcataagtcgttctataagggattcacatgcacaaatcccggcataagatccaaatcagaaccgtgccattacgttcgggggttatactaggcaaatatcggcatataatcgaccggtgaaatccgtgcccgaaagcgaggagcgaatttctcaagtaatgaaaaagaatgaatggcccacaaagcataaccggctgcctatttctagtggagggtctacaagaaaataagacggtttagcgaaagagtccagtttcggaaagaccgaaatatattcctacgcttgaccgaataggagactaagactaatcctaagcgaggtcgtcattggccaaagttaaaccagcggccaagaaaaatgggagaaaggagccaagaccctactgaagcaagtggaagacccactcagggatcctgatggtcggattggatatagcgaggacccaatttcaatgactccatagaactaggaacaaatactacactgctattccagtagcaggactagtagaaaagaagcgagtatttagcgtaaatggatagcctacacaagattctcatgtctcagagggcaagcaccccacaaaaagggactgagagatcgggccctggtaaatgtataaagattcatggtttgccaaaattcaatttcgtaaaacgaggttctcaaatcaagatgttgggccgatacttggtgacgctcgtcgctttgacatgtgtcctcttgataccggttatagcacaggactgtaatgcggatatgccttgtgctactggttgttggtaagtccttgcctagtaacgtgggttacatgcttggtattaattcttcttttagctcaaaagatggcttctgcgggacaacccctgagcattgtggtggaggatgtctcgcgaactgtgactataaacttggatgtgatgcaaataacccctgcgaaaaaggatgctggtaagggattccaccctgtcattatgtcggcattccataattctgtcaatctcattgtggttatcatatcatatagcaacaatttcggattttgcggccatgggccagatttctgcggtaaggacgtttgtgtgaacaattgtgaccgcaaatcggaatgtgaccctggcttcggatccgagtgggcggaaagctcgacttgtccattgaatgtttgttgctcggaatttgtaagtcatcacatcgtcgggtgtatatgggttttggcaggcactgacggttattctgaacatgtaggggtactgtggaacaaccaaggaatttgtaagttatactaaaccctgcacttaaccatccgctatttaggttaacagtgttcggtctgcgtatagtgcggaaacaagactgtaaatcacaaaacttgctcaaaagaccgatatctgtctagagtggtgggctactatgaaggatggtccactcggcgcccctgccataggttctggcccgaacagatcccacttggcgtctacagtcacatcaactttgcgtttgccacgatcgacccggaaacatataaggtcctgccagccgataacagggataaagacctttataagcgaattgctgccttgaagacatacgatcctaatgtgaaaatcctcatcgcgttgggtggttggaccttcaacgatcctggtcccacggctacgattttctccgaccttgctgcctctgaaaccaagcagaaaattttcttcgaatctttgatcaatttcttgtctgttcatgactttgacggcgttgatttggactgggagtatcccgaagccgacgatcgcagcggaaaacctgaagattataaaaacttcccgaccttcatggagaatctcaggaaagccctagatggaacaggagggcgaaacaccctttctatcaccttacctgcctcatactggtatcttcaacactttgacttgaaagaattagcgaaacatgtctcgttcttcaacattatgtcctatgacatgcacggcatctgggacgaaggaaacaaatggactgggtcttatctcaatgcccataccaaccttactgagattaaacaaggaatggatcttctgtggcgtaatgacgtgaaccctgatcaggtggtgatgggtcttgcattttacggccgcacgtataccacttcggggggttgtgttgagcctggatgcgagtatttatcgggaggctttgccggagaatgcagccatgaaactggtatccttctcaacaacgagatcatggacattatcaacaagaggaatctcgagtccaaactatacaaggaagctactatcaaggtcgtcacctgggatgaccaatgggtttctatggacgataaagaaaccctgggcatgaaggcagatttcgctcgcgagcaatgtcttagtggtgtgatggtttgggctatcagccatgacacaccaacggcagacttctctcgggatttggcaaaagtgtctaacagacaagtatccatgcaatttgataaaatcgataacgacacggtcattgagagaaccgaccatagccaatgtcgctggacaaattgtgcacagccatgtccagcaggatggtctatgatcaagcgagcggacaaatggaagacatacgagggtgagccaatgatggattccactttttgtttgggcgtcggctacgcctcattttgttgcccacctacatcgccccttccaaagtgtggctggtatggctacaacgatggtaagtgtaaagctggttgtgaggatggaatgctcgagattggctcaaccaatgagggatgccagtttgatgtccctcaacagtaccagtcagcttgctgctctcctacagatgacaatggaaaagaactgagcagtatggcgctatacaacacgtgcgaatggtctgaaccacttgtcctttgcgacgatggtaagtgctcaggcacgaaagataccgtgttggttgaatcgagccgcggcagcggcgttacccattgcagtgcttggaataacggtgaacgtcaccagcacaaacgcaaatactgctgcgatgcctcgagaaagaacaagaagttcgaaaactgtgaatggcatgatggcagtgacctgatccacccagtcacgtccgacatgcgttgctggtctggttgtcccgatggccagatccgtgtagcaatgaacgatgatggcaagtgcctttatggtggtgctcgggcatactgctgcgatggcaccgactacaccgagacagaacatctttcggacgaattgcaacagtttcaagatgagctaagcgattggatcaccaatgcaaaatgtgagctccatctcacgaaaagaagtggcggcctcgaggtccgtgaggatctttgtgagattgttgcgaagcattctctggttgtcaaactagctgcacttttcgctggctacttgaatttgagtggaaggacaagccactacaatcgcctagccaatatctggaactcggtctctaatacattcgaacatctcagtaccagatacatgcttccctggattacgtccaatcttacatatccagagttttatcgacagggctacgaagacactgcaagacgcattttgcaagtgcctgagtggtacgatgagatgattgctgattctaaaggcaccattttctgcacattagatttgtgcgaatacggcgatggcatgtgtgatcaggatgaggatactttggggctggtgcgccggcagactcagtggacagaaaaggttaccaatggatcaccccgtccttttctttaattgactaacgaatcttacgctttccagagagatgtacttgtgctgctgggaaaacgagcaaaggcaaaaaaggaattcattgattgcgaggacgatgataagaccaaaacgagagtccactatactcgatttgcatatcctggagcaagcgagtggcccttgacatccgttcaagctcgagaggccattgtcaatgcaaaaatgggcagttgcacagaaactgaagtgcgcgaacaggaagccactgaagcggacctcaatgcaggggaaaacaatagccctccgaatattaacagtaagtggatgtctgtgaaaataaaagcaaaaggccctatgaactaattttagtggcagcggagcacctcattgaagtaaaactgatggccctatttatgcaatgggctgtcaaaggggacaattgtgctgttgactgcggtttctttgctgatttcttcactcaagaggttatcaacggcgcacctcggacaccaggaagcggtcaagacctcaagcgtcctattgatcgcgtcatggaacagtttggaagcaaatccaataaggaagtattccgactgctccgacagagtatcaatgtgatcaaaggtgatgtaagtatcatctctttccgctgcaaactcaccatggacaagtattaaaacaaatcatgtttagctttggagcttaaatccagttccaggaaatccattaaagtggccggggatggtccaggatgaggatcctcgcaaggcattgactctaatacgcgatgtaggttgcttcacaacacaaaatgaaagctacatgactgactgggatttgctagactattgcggtctacaactaccaaaacatgccgagagtcttagaacggttcaaaatggtcaacgacggcattcgcagtgaattgaaccgcgcagcaaaggcatataaagcacagaagggcaaggacgtcgaccttgcagactgttgggaccggtttttcaaacagagaacgaataaaatgctagagacgggtcgcaggtttgttaacaccgcgattgagcaaatgcgcaataaatggactcacaatccggaggctagcgttatgtggaatgcccaggctcaggaggtccgccatgctctggaaactctggagagccacgtgggagagatttacatggctgatctcgagcttgaagaactcagttagtctgccgataagtatctaaacaatttctatcacaacatgtatatttttgcactaaatatacgaatgatccagtttgaaatacgaagtttgtgatggaccagtcatttgtgatgttacaaatcaaacacaagttacttgactatcctagatgatagatctctgaagctcatgatactgagactccgtgatcgtctcttttctcggctcgctaggatagcaggaacgagagaaaagatcgtaatcggacggacaaaggaaaacgtcttcctcctcgacgagtgaagaatgtccatctgtataaatcactttcccaggacgttccatcccccagtctccccattgttgttctccagtattcagattctcacaagacagagcaaactggaagacagatgtcagacaattcctgagcgatccatcgtagtgctctgaacactcattttccgggtcgtgtggatcaaaatcacagtcaatcacgttaacgtatccgaccatactagacttgtcatctggatctgagctcgccaaaatcgaccgcatagagcggtcatccaagacaaggcagtagtcaaatcgaggtataccgagcccacgatcgaaagcccggctttctacccattgtatgtgtcgtttgcgaatagcatcggtcgaggctccttctaagtttggatcctgaacgataacatttcgataaccctcgtaaacaaggctatggacatcgggctggaattggaactcttctaaatctctgaatgcagccattgcggcgtagcagtaccaattaagcttcgcgatcacggccgcccagtcctgatcagatgtggttgtatagctcgtgcgatagataacatatccccatggccaacctccggtcttcacagactggaaccgaaaaaaccgagggatccaaccattccagccattaggccatcctggttttgtactgaatcgctttcttctctcaagagaggtttcctcgggtggaaactcggatgatcgccacggcgtaacccatgactcgtcgtgaaagatgtccatgttatccgacatgactcttcaggtatcacagaatgaatccagtaggcccgctatctcgcctaatatggttttgtctgttagagattttttttacgagcgttcgctagcccactagcgtcttggcgactgagtcgttcgcggcacttactaaccctctcttggtatacacataatgaataactggctaaagctctaactagatatatcgcgatggcattatataagtttatccccctctagtcgttccaccttctctatctccagctggctatcaatttagacgccaatgcatacaaaatacttaacccacaagctagcacatgagcttcccaccaacggattccagttattgaactgcgccgccgtgatcccgtacttatgctataaaaaaaactacactaaagggagaggggggaaatgggaggtttgaaccaaaaccgtggtctttcgacattcaaaaggaccattccctcctttgtacatcttgaacgccaatgttgaccattttacgatcatatttaaccgagcttgcccattcattcagctaggaatatccatctagccaagacaatggcgagaatttcaaaacaatcaaagaacgccagcgtggagaagaaattactgcaacagaagagaggccggcgcaagttatgcctagagaaaaaggcacgggactatagcaaaatgtgcggggcggaagtctgcttgggcatacgcattcgacaatcagggaaagttttcttatattccgcaggcgcctccgagttctggtcgacactctgctctcaattagtaagttcaggtgagaatgggagatcacaagttttctagctctttcaggactcttactatccaaggccagttgagaggcatgaaaagtgcctctaaacgcaacactttgatggaccattttgagcggttttggcggtcgggcgggctagcagcgcatgtggagatcagaccccgaagatccagcgaggtcagatctcacgccctcaaggataaacaagagcatcaatcacaaggactatggtcaacttttcctgttcaaaagagcatagggcggagaaactcaaatcaacaaaaaattgtttgttttaaaaattcactttttgcatttccacttgtcgctggatcatattcgctcccatagatagcaacccagagggtccacgcacccatagttccctagagcccaaaatgtaattatgtacacatttacaagttaccacaaatcagtctctttccccgtaacgtataaataagaaagcagcccatatttactgcctattgatcaacaaactttcgatcatgcaagtacacatgtgaggacttcccacatgtgtaactcaagttcatccaacacatagatcggtcaacatagtatgtaagatctatgtggaattgctacacatgttccgcctactttacctggaaaaaatcaaggcattcctcagtcaacgttaaacttgtctggtgttcttctgaccctgtcgaatttcgtggtggtcaaaaaagcttatggtgggacctattgatggcgctcatgtaactacaaggttcctctgatgactcacatactgagcaagggcactgaccaatcattggagttctctacgcgcgcgcgattgacggtgatgcgggccaaccctttttcacatgcacgctgacttccaactcaagcaatagcaggactcccgatggacacagcacaattttccaagtgcccaactagctaggtgatcatgggatggcccacagtttcccaatcctttcagtatccctggagcattgccctctctggataagtggttcctgcgacaggccacagtttttcctatatgcggaaaccccgtgccgattgagtcgcttctccgtatcctatcggctgtccgatcgtgactgggcgcaagtacatgatgtggcgtaacgctctaccaagaaacactgtagggttcctagcaaattcttttgcccaagctgttactagaccataaactccgtctagttattttatgagctgacctcagagaggtagagaatcccaagcatgttacatcgacaagtcatactgcttcccgttttcatatagagaccgttcccaaaaatatttctgatgcctcgaccctaccctgctcctcatatcggttctgggtcaatgatattcaatatgcgagcgagaccttaatttccctctggaaagcctgtgaatccaaatgagtagcgttagtccaacatcaagaagatcaaacacaagtgcgcctccaaaaatgactgcatagtacgtccaggccaatgaacccggcaaagagagaacagtcacaacgatggcacaaggaagcatccagcataagtttgagccgagtgcttggtatagataccacctcggccccaagttggtagttgagtccataaaagatgtaggtccagtcaatggcctgtaaaatgtaagccaacgggaaaggaaacatcattctctctgcagaaagataccttccacattctttgggtgacagccgccacgtcgttcgaagcagataaataaagagcgaaagattgtatcccatgcacagatagcgcaatgcacacggtagtttcgaaaaccatgacaattccgcaggataaaagcgctggtcgaataatagctttcggaatgttaatagcttatccagacctcgtaagtttcagacgtaccgaaaacttccgctctagtggccttagggtattctatttgctgtgttgctcgaaaacggccccaattatgcccgacgaaagccaacgttgacgcttcaacagcctgaacagggaccattatgagcccccagcggattgtggtaaaaattccccaggccgtagcatagagatctccaagctgaactattctgttgactagccataaatagatggaattcctgatcgccgactcggcgaatgtgtataaacttggccgaactaatgttttcagtgcatcgaggcttattttcaagtttccgtggccatcggcttctcttttcttgcgcttcacaaccacacaaacaaagtaaagaagtcctaccgtcaccgataatatgtcgcaagttagtcgaataatagcctgtgttacaatggttggcgtatattttccaacacggaacgttgatatcagtaggaaatctaacacgatattgatcaaaaacttgctcgcgttgattatcaaagggatgtccggtttatccagcgctctggttgaggaagagatcgccgcttcggtcgcggatgtcaggccttggatggaggaccagcgtacataggcaagcgaggcatgtcgcacttcagccgggacaaaggcggctgcaagcttggtcgacgttgcaagaaatataacggtcatcagaagcccttgtgctgcacagacaatgatcatggtccaggcaaggttcagccgtgagtgcaggcttcgcgatgatttgtccccaataatcagccacgcagaacgcggaataccatcattcattacctcaacaatgatgccgatgtatgtgtatacatcagttgtgaccacctcgctggagcttaatttggcgacccatagcttgcttagggtgctgtaaacggcgggtggggcgaaggcaagtaggttgaagattgcggaaccagtaaaacttttaaatctgcagtcagcatccatcttcgatttcaagactgacatactcacgtctctcggctccagaacgcgcgtgtcctagatgaaagctcttcccctctgctcctcccttcgttggattgatgagcagcttcatcttggaccgttgtagatgctgcgttggcccccatgttatcttcttcccttttggtgacttacgcaacgcataaaaatgaaaagaggatggagagttcccaggcggtgcgttcccaagtctttgccgaggcgccaaagtgaatgcggggtccaagaacgtacattgctactgcatgagactcctttaactgacctaaatctttcggcctgcattgtaactgtatctcaaggcatgatatgtcacggaaactagaacttgacttggacattgtaagcgcgaggttggcactctacatagcttcttgcgagcctttcatacatgcattttcccgtggagaggcgaaagaaagaggggagcaggcgctaaaatgtggctgtggtccagagtgcaattctacaaggacaacagagccaatcatacttcagcggtacctagaaagtcacgggacccattctggagccacgtgtagtcccgagtagagactagggcccagttcggagattcattgtacatgtacagagacacatgcaaagtggaaactaatattgtggtattccacgttgttgtgtagcaaagaatgaattggcgcgtctggagaggatgcatgatttgttgcttgcaaaggtttcccagatcatgtcccagaaaacaatggctttccccgacccaattcagcttagcgcgatctgagtggggcgctgggagcgctgggaaatagagcgtgagtgtcccgtatttgtgtgagacctcgcagtcgcccatattagatgacggttctcagctagacagccacgttgtcccagtgaggattggttttacttccttaccagcttgctgtaggagcgggtctccgcagtagctttcattgggcgacaatataacagcgctgcggacgctagacggtgactgaaagcagagccagggcctagccgataactataaagagccagaggaatcctcttctgtaaaaagaatatcgaagaaaatctgtgctctctctactatcttactattgaaccgccttgatatctttctatctctgaatactctctacataatgcggtcgcatatcataattaagttgcccgcttctcaggttatatccctccaaatcctcttccccaatcaacagataaggcccgacaatgcagcgaagcagaccaagagatacaatatggtctttgttttcttaacttatcggccggttgggaggctggtgggcgagaagagatgagagcgcaccagactcacgatgcacttgtacataatgggacttctgtcgcctcactcttgcgccccgtctcaaattccatacgatcgaacaagccgcgccgccctcaaggcagcgtggggcgatggagaaacggctgcaggagctagagaagcaggtccaagcttacgatcggcttctccaggtctgggcaatatttcacactttggctgccagcaagagtagcttatgcttcgaaacatgaaatcttgataatgatctcggtgggtggatcaaggagtggcgatgaatacgttccctggatgaaacttaactaataatactttagtgtgtttcgatccaagctcctgaaattgcccgtgggggcgaggagtaagacttgattgtctgcttgacttttctagggccttcgatcaaaccacacgcactctttttgacttctgttctttaggagcacatcgtattcgcttgagagagcctgccattggtcggtgaaccaagctgcacccatggaagccaatgattagggcccgatttagttcagcattccatggaatattcccttgtcgaagatcctggtggaaaagagtttatctccttcaacgaccgttctatcgcaggacggagcgacttctcgggcttgagatggctcaaatctccaccaccccaacccataaggagcatgtggcgtatatctccagcgccatgtagaaagtagacgttggccaggtcaattactcccagaaaaactggaatcgctgatccttgtgcgcgctgaaggatacggtaaatatccgctcctcacgacaccggttgccacttccctacccacactcgttgtaatattaattttagctcgcgctagcatatttatggcttgattgaagtggccggtgagatataaaagcagaatggattagttgtcgttacattgtgatgctgccactacatccaggagtagtcagtcgccaacggatcaggcagctttcactgtcctgacagaaagaattagccaaaacatggcaagggccatcagagatagcttgtagcttacagtatagagggatgaatgtaactagcaagcacgacgcactatactggtctctatagagtacggaagctttttggcccgcaagcgcttcggaaagtatatcaggttctccctcacccaagccttgcaggaaaaataagacgttgccaggctgatcttaccattgcttcgccactacagggtaccagtggatgcatgcccattcgagattgttgttcaagcgagcccgccttgtctgcggagtggcacattaaggagaaatctcagctgtttatatgtggccccgaatagcaactgctgccaagagccagagaatcccctatgctggtgggcctcaatggggagcaggaattattctacatctagcctaggccaccaaagaacatgttgatactgctgcttaacgcggatgtcatgcggatggaaactagcatgcctcaaccactcccagtggcctacgaagcccaaataacgacgcccaccctcaactcaagcctccccgcccacttaacagtgcaatacaagcacggtcccccagccctacgaacaacggccgccctggcaacatgcgcacaccacgcccgcgcgaccacttcggccccgggagcagacgcgttgataataatgatctcctcttccacagactccggcgttacctccgctatctcattcatcgagacgttccggaacctgtaatcatcaagttgtcggcggtggatcttatggccccttgcttgatcggaaagcgagcagggcgggagggtgataaagacgggggtatggtccaaggcgaaggtgatttccttccccgtcccgggctgtctgaaagccagagaagcgctccagagccaggtacccccaggctcgaactggtgggagcgataggcgcggcggagatccagcgagcgtagttcccacgcggcagtgtcccgttgcggagggtgcaagttgaaaatctccggctggtttgtggcgcgccagagtggcgcaaggtccaggtttcccgcaatgacgatgtctcgagttgactctgcagaaggcggggggagcagtgcagaggccgggttgaacgccaccgtcgtgatgaggcagtgtgccgcgggggcctcctcgtccgtctgtgtgtgcaacgttgctgctgggcatgggccgacccagccgttgagcgaggtgacgccaggcaggcagccgaggacgcggccgaggactgagcggctgcgccagtagctgcactcgggcagcgcgacgccgcattcgctattcggcgccattcccacgctttggattgccggcgtgctgaggaccagcatggccatgaggacgtgtgcgaagtgcttgcccgggagcaccacggcgaagagccagtccacctggacagggtaaatgggttcgtgcgacgcaagccagtcctcgcgggccttcttagcgcaaagccggacggcttcaaggtacggccactgcatccgctctgcgaagaggaacagcccctcgagctgctgctcgtccttagccggtcgcggcgcgatcgttcggcccatggggtccaagtctgcgattctccgagcgcgcatgagcgccgctttttctttctcgcctgcggcttgctcgattgccttcaactccgcgccgagcgcgtcttgtgctttgtctaggtcctggaggatcggtagcttctcgtcgaatgcgtgtgcgaggggcacggcttcgcggaaggcctcgcgcgcccggagatagttcttgtagcccaggcatgccctgcccaggaggacataccccgccggacgatccgggtccagtcgctgcagtatcactgcatccctcgctgcatccctgtagttctggaatctgagcagccactcgcccctcgcctggacggtgtcgtagtttgccggattaaccgcgagcgctttgtagaagaagaccgcagcacgctgaaactgcttcgcctcggtagcctcctccgcgagacgaaccagctcccgtgcctcctgccgatcctgttcgggtacgccagccgctttggcatcctgcacttcccgcgcgagcgcgccatgcccgccaacgtggatcctcgtgtttgcaacccaccgctcgctggtaatcaacgacgcaaggatcgcacgcgtgaaacgagcatatatccccttcgtacccccggccccttgcatccccatccccgcccccgaggcaagccgcagcgcgagctccctcgccataaccatgcgcatccggtcggcccacgcgccctcatacgagccctcctggaaacgtgtcatcgtcttggcaataaccgagcggcccgaaatatcctcctgctcgtggtgaaacgcaaacaggaattcgagcacgcgctcgctgtgccccatctcctgcatttcccacgaccccgctataccctcccacgccaccttcccaaccgtctcaaccaacgcggcgatttgctcctcggggtcatcggcaggcacagtcccggatcggatctcctcgatcctgcagagcagcgtcgccgggtcgaaagttaggtcggggacctcgaggaggaggtttgggtgtgcccgctggggcatccggccgtgtgcgagttcggcgttccagaggtcgaggccgaagccctcgactgtaaccgtcccgttggcatgggcgtggtcgtacagtggtgaggcttcggggtcgaagaggatgcagtcttcctcgtttagctcgtttgggctctcggagtggcggcggaggtatttcctctggatccggtagagttctggtcgcggttagctgtcttcaagcctatataatgtgccaggtagcgtagctctatataccaaacgacggatgctccgcctccacgaacccgtgctccgcccccgacatcttcatcaagccggccagctttccatatggcccgtccccttgttccttgccaaaccgatgcacatccaccgcgatgcgcgggcgataagcggtcgcaacctggatggtaaacaccaaactgccctcccgttcgtctttgatgaacatccgcgcggcagcgagaccactgtcaacattcgcggcattggaattggctggcgcattcttccggccttcgtttggcgtcctctctgccgaggctgcggcgtctgtctttccacttgcattgggatccttcccggtccgacctattgacatcctcttgaatcgggctttgatgctgttcatctttcctgtgagatgaggcgtggaaagcctattgcctgaggtgaagtggaggagttactctgcgagattgttgggacgaccgtcctgctttaaggcactgcaacgccgtgcgctaatgcaattggatacgagccgtatgagaactcgctcatcttactgctatatgccgagagggccattcgcggggttctactggccgaaggtctgggcgggacacttggcagtttctgggcgtctaatcccggcgttggtgggatctatgtaagtccgtggtaagcgcagggtataggaactatctggtcgggtatatgtgggtgatagtagttattgacgagcattcatggacagagggggatgctgcagctatggtcttgcttctatgcttgattatatcttttgacatcaatattgacccgactttctagatattattccggctgtatgcgttctcatcgatacctcgcgggacaaatatccagcaacggtttgaatacatgctgcaaactgacttctgaaacgtgaaatcattccaatccggtttcggcgccgaggtagtaaatgtgcattctacttggacaaagcatatacgatgctatagttagcaacattccttttagtctagggagaatagaagttactccattttccgctcgatccatatatcaagcctgttagaggtaggttggatgacattctgaagggttgaagagcaagtgccagaagagtgccagaagagtgccaggaaagtgccaagagctacttacgaatcaaggttcgtgcatagtgtgatgaaccattggccaatttaccccggtctttgcatgatacaaatgctcctaggatagattcacagaaggtagcatttctcagtctatactttgtttgattggctggttaatgctagctgcctaggttttttttttcgtggtaaagataataccaaagctcctgggatgcattttgctctgccgggtactggtttgattggctacaaacgaccaggggttgctgcagctaaggcgcagactcatctgatctccaaacatcccactggttcccagattctatggttctgttggcagaggcagcctccgtgtgtaccataatggcttcaagcctaggtctgtgacagcgtttgcattagctgcatgggcatcggccttgcttgtgattagtcctcgatcttcttaaccacccttcttaaccacccttcttaaccactcttcttaaccactcttcttaaccactcttcttaaccactcttcttaaccactaacacccccaccctctacttgccactagatatctctgaatattatttgcgacgatgctcagtaggttgcttgttgacgcaaacagatgtgctgatctcaagaattcatttattaggtacgttagccagatttcaattttaagaattagagaaagccaaattaacatttcgcaaaatacattgtttacttttatttctcccccagcaggagattggactcatacggtatcaggttgtgcatctggtcctgaaaatttgcccactttacgattacactgacttggtctggaggtccatccagcctcacatagatagtctttgctcctaagccagagtagcgtcattgagtgtcatttagccgaccttcaatctactgaccatcgagggcttctgtacgaaaatctatttcacgattgattggacatgctatttttctgggtttggatcaatgttattagtcgatacagacacgtgatgaataatgattggggattggaaaactgaacaagaagtgatgttatacaacataatgaaggagagaaatatcgggaagtactcaaagatatacgtacacattcagactctttgtgagatttcacgcctaaactcaacaggtaaagacttccacaggggtagaatctaatagaagaaaagatgggaaagaccagtaccaatgcaaccgtgatgcttcagatcacacgcccttctcctgtcaaaaaaatcttttatcatgtatcaggagctatggaggctcgataacgccgaatatcttcatcttcttttctgacccgctccagcttgaagaagttgtaaagcgcaagaagtgctgaacagatgagaagagttactccagtaataacggttgttataatagccattaccgaccaatccccaccttgagatgtacagacattgatgacagtggtcagcagcccggcagcagcatgtaggcataggggtctagtccagaattagagttggatctggcttttcatacctctttcagttaggatttgctcacttacacaaacactttgttgatcagcaaggggtagtttcccctaagctttgggaaatgcatctgccacatgagagccgcaattccactaacaaaaagcaagcacgcaatggcgagtagtggggggttctgaatcatatgtagaacttcacggccggtcctgctggtttgtaacgtcttttcaacctggtttgaggtctgcaatgaagtgaacgtgccgggaatgaccagatagccggccagcagtgcccagttagccgcaccaaccgtgatactgaaacgcatgtccatttgtgcttcttccctaagaattttggcataggtagtttcgttggcgtgatgttcctggtaggctctacacagccccggggtcacatccgcagctgagcaaggcggaacaagcacagggtttattccaggaagtggggacttttccgatcctatcttcactggcatacttatatggttgttcacaacgaaggctatgaccaaggaaatttcagggttaccattggaagacaaatcaacaaagaactttgtcagttctttaaatagtccgtagggaaaaggccgctaccgtacttagtcaaactaggtctagcttctactataggtgaagcctcatttttgccttgcgataagccttgcatggtctggtttccgaagtcagaaacgaatggcttctgataaaaaaaatgcggaagttgttgcatacttgatttaagcggtcgtcatctgcgaatgcactggcggaaggaatcagctgtgggcggcggttgctgatatagcggtaacatcattatattaccttcagtggccattatgtctaggttcaggtatttgtgacaacatgggaatcacgctacgttttcttcggcggccaacatagatctttctcaaacaggcccactgatgagaagccagatccccactgtcaattttgctcgtatatacatagatatcttgaaacatgcaaggtggatagcatcatgtccattgatttgtgggcagaagggattgaacattgaggatcataagctcgctacattccgtgacgctctcgcggcagctgccatacgatgtacaaatttccagcaatatgaaacatgtcgcgagggttcggatctcagagtgtgtgccagtcggatcgtaaaccctatcgaatcattagcccacctggaccaccgccaaggctaccgttatatcttacctggtagtctctcgtttgctctatccgagtcattcgtcaagggacggcataccgaaacggccagctgctcgatcgcatgaatcaaatggcgaatctttgtgcgggagcctttaggtatgaagattggaagagatggtaagcaagatatccgagcttcttcgtgtcggacaaaagccgaaggttgaaatgatcccaaaaatgtacattgacgacaggcctatcattaggatcccgtatgcaattcgtctcttgacaccagaggccacctttcttccttagcattgcgtacgatactagatttgtatggaatccaggtgagtatagagtatagagtatcactcaatgtgatctccttccttcctttcgctgggtgtcttcctactaggcgagctgtacccctgccgagtatctttgtggtgctgtctccagttgaaacttctatatcgtccggggtgaagtcaacaaataagctcctatcattacagatatgcgtactcgatccggtatcgagaatccatcggtcatgtagagagggctcatcactttttgctacagatagcacatgctcgctgatctgtacggcttcatgcttttggtaggtggtggcaaagctaacctggttagcatattcagcctttggctgagcttcagcaaccaccttttccacccattgcttccaggcgaggtcctttgctaacttctttttcgctttctctagcgtacgctcattgagagtgtatccctccggtcgaattgcttcattcatgatatagcaagtagcaaccttatgcttcgggtgagagctgccacagggacagcgtctcttttcaaatgggagcttctcttgcttcacttccggtttcgcttcttggtgtccttgccaggttgaaaatgcaccttttggagcattagttgaggtcacagtttgaacacctatctcacgattcatagcgcggaatgattcgagaagatctcgagtatcgtacagtacaccttcttgtccatgacaatctcctggtatttcccttgccaccagatagggagcgcctctttcacagtgtgtaggaaatccctatttgcatctccatcattgatgccaaggctgacggcttgctctcttagtgagttccactgctgaagccattcctcgatatctcctgtcggcttctgcattgcaaagaccttccacttcatacggatttcttcttcgtacgcagtcgatcgggcaaagcgagacttcagatacacaagcctatcatacggagtacgatatgcaactagagagagacggtggattggatcaaggtatgtgaggatatattcatttacatcgctcagtccctttgtctgcttctcccaccttgtgtacttcactttgtacacatccatacggtctcgccagatccttcgttccttctcatcgccttcctcggggtattggggttccaccggttcttggagaggctcgggccgtttattagagggatcggttgtcgacgaggtgaggtctggattacagagatcccacacattcttttgtacggcatatagctgcacctttgcaaaccaggtgagccactgcggcgagtccttcagtttttcgccctttgtggcggagaggaatgatgctgcctccattactggattcaggggtagctttgcacagcttcagaatagcttcgggggttgcgagacacttctagcagcgggctagatactgtattccaactacagtagtctcattcagtgcgaaccgggctcataactgtcggcgtgggccgtattgtaaaaatgtagggtccaatcaatggtgttcaactctctgtattgctgtatcgacttccctaacaatttatacgggccgtcgattactaatctaaaattacaaaatgcataggatcaatggatcctccggtatgccggtatgccaatgcatctactccgacatattctgtcaaccttaggattcggccccaaaagatttgatctcataatttggctttttgatcgtcagggttccgctcggtattgagaaagtgaaacggccttgtgggcttactagtctcactctctaacaaagccatgcaaactcaatattattcttaaatccgatcatcttccagaactggggatggttggaaacctacaaacatagttatctccactaagggcgggcctactatttttgcacgttacatgcgtgcagctcttagtactatgtaagacatccagtttcaggttgaagctctcattttgacgcagctactgtttcatgcagagaactcggtatcacggtcacacctatagaagagctctaaatttaatataaatagctgacctagaatcttaaacctgtttgtttttcctaggcccctaaagtttttggtcctgcttcctggctctcatttcttgtcattcaccatgcttctcactaaattctcatctcttctattgctggccactcaagctgccgcacatggcctaatcacccgtatcatgggtgcgaacggtgttgagatgccgggactaacaggtaacgggttatcgttgagccctccgtattttcaacattggttaatgattgactctagttgttgatggaacgccacgcgactgcccctctgcggtgtgcggtgggcagaaagataccgcagtgatacgagagcaggaaatgggaagtatcaaggcttcggctttgggccgcactctaatttctggtcctgtagacccaaagagagtaatcatgaatttcatgacacctaataccgacacgcggggtcacacccgccattttcatcaaggtcttccatattctcgcaatattaaatcctactccgggtactaatgtcttttatagcccgccaactgatcaacgacgcggctagtgtcgtcactaatgccggcggagctattctgaatggttagtatgtgaatttcatgacacctaatcccgacacgcgggttcacacccgccattttcatcaaggtcttccatattctcgcaatattaaatcctactccgggtactaatgtcttttatagcccgccaactgatcaacgacgcggctagtgtcgtcactaatgccggcggagctattctgaatggttagtatgagcgttaaattttctttattctgcacaaaaaaaaagaagaaaaaaaaactaagctatctaaaggcgcccaggatgttgcagacaaaacgccttttggtggtgctatcaagggtaaaccctccctccttaaccaccaagatttggtgctcatgacatcaaacaggtgcgcaatcagctgttgatgatgtggcgggtactctaccacggacagaatctggcgcagttacgcccagtggcactgtagagaaaggggtcgagggttatgctggcaaaggttctgtcaatggattgccctctgtttccgacgcgggggtcatcacgatgacttatcatcaggttcgtcacaggccgcggctctactttactcaccccatgcttacttttccgacataaaggtaaaccaagacggtgcaggtcctttgtcggcggacatcgacgcaacgagtggaggtacggacattaaagcgttcaaaccagccaaagttatccaaaacattccaggggtcgcgggattttcaacctccagcaccatggattatgaggtcaaggttcaactgccctcagggatgaagtgcagcggcgttgttggtaacaccaaaaatgtttgcatcatgcgggtcagaaacaatgccatttcaggcccatttgggggttcggctgctttcacaaactgatgtgttggatcatcccagaagctggtagatgcttacagactgagcgctttgcctgtctgtctttgcctgtctgtctttgcctgacagcttggtttgccagtttctcggggtataaataccctgctttttccatagatctaggaatcaagatttctttcttctctctcattccatcttcatagaaatcttccagctaccggatctgtagctgcgtcataatgtaatatggaaatcactacaattttgaacacgttgatagcctactacatggtgcttgaaaccttcttaatcgcacgggctagaaaatatttgcatctagctattgtcatgaacggcctgtgatgtaagtggctcttgtctagtgaagggagatgaaggcaacggcttactatctgactccctgctgtcccctcagatccaaaatgagcttcactttcgcggaaattgtagagcgatttaatcttcctttaaattccgtttctgcaccaactacgatttcctatcggagtgggtcctcgaggaatcgatcaccattccctgtgtgatgccccggaaatcgacgacctttttgcggcgagactattatgaccggcctaaagtcattcccgacggtatgaggaacatggccatggtgggcagttcgtcgttattccttgtgaaatgtctgttagtatggactattgcgtgcgtcgggcagacaatagatcatcccatgggattaggctagagcttcaacgggtttgagcgagcgcattgcaatatatttgccggaaatatgcccctgaagcgccttaaaaagtgacaaccttgaatggggctcttttcttgtcagtgtcgttaaattcgaagtgcgcaggctgcttataggataattcgtccaatttccaaagccgctgtggcaatgctgcaatttactgtactacttaagacgtgatatatgtccctcctcgttatcgtagaagtattaaagtggtaggactctatgcaagagcaaaaagcaacatagaaggaattacatcccccagtggctctcggaaaatttgacaccagtcccctatttagatcattcccggcggagggctgcaaagagttcaagggctcattggcttccggggttgaaattaggatcttcgtcgcctgaggtctgcgtcaccgttaggaggcttgggattctttgcatgtgcgatattttccctcccagactgagcggtggagtaacgagggtctgtgtgaggagtgtcggagctgaataatccggagtctaggatgccgaattcgctgaagttgaaattattgaatccggaatcaagaagattgcttttctggatgtcatccgaaggaccatcgtctgaatcggcaggagagacataatctgaaggaagcaagtctgcccacttgtcgcccacaaagttaatctgctccccgattagataaaggagtttggctggccagatgcaccatcaaagatatcgagtatcatcccagtatggcatttgaagacctgcgaatgaaggccgtcgtggagcagtaaagggaaaatgtgttgcttattcggggataattgttgtcatttttgtgaccgaggaccttgctggcttttttggatatgctgcatgcgctccacggagggatggacaggtgttattggcgacctagtattcttcccttcattgaggcttggagaaatcgagggcagcgacaaccaattatgacaggagtgttgatcaggaggtgatgtcgacgaggagtcgggcttgtggtgggggggggcaactcgaaatcaaaggttggactcttgaaaagacggccggggtcatcatgtggagtgattgcatgattctccttctcatcgtcccgcttgtcgtgaggcactgcgagcgctgcattggggagaacagcttctcacaaataagacaccaatcaacggccccttttgagcgtttggggaaagcgaccttcgcacatgctttggggcgaggcctttgttatctgttctcgagataagtcgcacttccatattcctcgccatattagattagaaggcgcgctgcaggtcctccatcggatgctgctcatgtcgacgatgttcggccgtataagtaagccggcgcgtctcggcgctaatttctcggtgttggttgtctgcctctacgtcgtcgccattgtcatgggtactgctcatactaggagttactcctttggttagaatgaaagacaactcagtgggctccggagatgatgccaaaggcttgttggaggcagcctacctccgagttctgaaagcagggcgggaactgaacgggccagtctttcggttcctcaatggacgtttttctttttctctagtagcttcttgttccacctgtttcctgggcgcatgttcttgaacctatagagccgggccacacggattgcagaagagcatttggacccactcatcgacggtcttcccaggagctttcctatagatcttgaatttttgcatctcatcctgggcgttgtgttccaaggccaaccagaaaagcctgctagagtccacctctttttgtctcttttgtcgggcttatgtttaccagccagcgtaggatgcgtctccaagtcataagaaaaccgtcactgttcggtaaaccaacgcgaccgattgggaaacaagtctgcactggcaaaagccaagcactgctatccacaagggagccaacgtggctcagatgaatatcttctatggaagaaaatcatatgctgctggtgtttggtgtgttttgtgttcaagtttgttgtcaacttcctgacaccattcaccatccgtccatcgccaaaggtgctggaacgagaacactccggctgaaccacggccatctaacaaccccaaaagcgccagagatgcaatcccttcctcacgttcctattcatgaccaaatatgatctggcagccacgttgctcctggagatatgcttcaaaccaattggtggcccgggcttcatgtggatacggtaactaaattgaaacatccgcgattcggtcgttggtatatgtaccgctattgaggcaaaatattggcatctttagtccttctagaagccgtcgttgacaatggtagcccgcaaaactttgactgtggatatatccctcacggtggacctgaccgcttcagccccaaacaattaaaaggttctgattgtccacatgatcgatgccctcgttgctccaataacttcatagtacaacacatcactagcaaggccaagcgatcatggatcgcaaacacagtggacgtacatggcaaactggcatcgctactttagatccccttctcgaggaatccatgggctaacaaatttacttcatgaagacaatgaatcggctgaaaacttccatcgggtcgctggccaattcatccatggaaatagcggccacacaagccaggttttacaaccgcctgttgaccagtccactggctctgtagctacaggggtacttacttccgttggtacctctcttgctagctcaggggcctctacgttgcctccaatcgtcataaaggctgaaagccaagacttggctctctgaatgcgaaaaagagagcagccgaatcctcaaccctcccacgaaagcgacgctgacattcattccacctctcaaatatcgagccgctgtcaacgggtgtatcgaaagagtctcccaatccttatcaaaattagtagcaaaacggttaacgatacaattcaatacccccaacgctatccgaccgtatcctctgtttcccggataccatgcattgtgcatgttatgtagcttagcctaattaaatacctacctgaagagatcaaaatgaacaatattgcaggggcggtcagagtggtctgacgaaggaacgaagtcgctacagtccgctccaggtcactattatttcagaaatatcgtggctacattaaaaaagccgaatgagtcatattatattctagtttcatacatactacaaaattttagattcgagaactcgctgtattggttaacgccaatcaccagcgcagaaaggctttccgggcgctttgaacgacagggctaaagattctatctatccaagatattcccacacactggaatgctacattcctaacgctcgaacgtgcgaagaagctccaacgagagttcaatcactcctgtcagctcgatcaagaggaatggtgctaagtgcttttgatcacaatgtctttttccgttacactaagaccttatcagactcaagatgttactcttcattccgtctgtatcatctataatgagctcttctgctaccttgataatgcagatgagttattaggacacaaggctgttccctgacaaaggagaattctccaggcgcctcgggggacgagaatggagctctcaaaatactgcaaagtttctgacactgaacagtttggtacaatctatgctattgcaacaattatatgtccatcaaaaaatcttcagttcttcgggggcgacaattggaaagtgaaaaatgagaagggaggacaatttccttggtgtcgatctttcgggttataattcagaaggaactcgaccagtgccaaaaacgtattaccccccaaaagaagcccttaaaagcccaagtctcaagaggtcaaggaacaggagcttaatcttatgatggactcgcacgctgcatgcaaggagaagttgaccaaacagaggatgaaattacacggtatatagcaaaggatctgtatacctccctgctttcattgtatgttttttcagctaagtagtctaatagttcttaccaaatgcaaaccaaaagttttatggaagatgcataagcttgagtatccagtgcttgcagcgatgtgcgtgttcaccgtccgacccagacccattactgtgtcgtacggaagaccatttagaactgaccgatcacttcttggtggctcccagtggtagcaagaacggtatgtggacgcagtccaccgatcttccattccccgccagtcaacacatagcacagctcaagataggcactggaatcccattcggctgtcttgccgtcggggaacttcctgacatgccgagctcggacctgccaatttcctatcgcttcggtatcattgacacgtgtgaaggctacactcccgagaaaatgttgggtttgcacttccaagtacattagtaaaaacaaggaatttccacgaggtgataacttacatcttgggtcaccgagccggtcctctcggaacgcgaaattaacaaaatcgtcgggagggcagtgtttaaccaccccaacagctgggtaatcggtatagtcggctattatccgcgatgtagcgatggaaataaaagcatctttatcctgtcatggcatcaattgagaattgtagaggtaaacgtgggatactaatgtaattaccctacctttttgtcccaggccatggcccatttatatgccagttcacgaaattttcgctcatctgcgatggtgtaatccattattgatgggtggtactgtgccctgcgtgacgatgtccaagtccaaaacaaaattgctgcctctatttatgttaaggttagtgcgttttcaaaatccgtaggagtcttctgcagcttacaccgacgccgtaggttgttcatttaagggcccataataggggtcatgcttccaaatgatgtgaatgataatgcacatggcaaacttcacctgccgaaaaacacggctattcggcatccctcgggtttatcggttggatttcggagataagcatagcgtctgctgttcttcctgacttggttagacaattgtagtcggttcagtggcacatttaaggttttagtatccagttttagataatgatagacaacgggttttggtgttggtcagacgccgagatggcacgctaaatgctgcatctgcaactcgagccctgccatgaaacttgatctcgctaccctccggttactcctagctaggttttatagccgagatgccgtaacgaagacctacactgcccagctccgtgttcagttatctgtgcttgagtttctattgttcttgggcgttcactatcagaggagttagtaagcggaagtacggagctttcccattttgccgagcagatttcacggacatggatgctgtatgtgggtccgccacattttttcctaactagactgaaagtctgcatcgcctctttgtagccccattgagctcgcactgggcagcagtccttgccaggccgttgagactatggattaataccttctcgtggtgtccggtgttaatccctgttggggagaccgatgtaatctgccaaggttgtgcggttgcggcccgtcgcggggtaacccgaccgcacaatcactccaaaatcaggggatacggataataaaaaccatccgacttatttttatccgactcacactcgagcccagaagctggtcttgcgttaccagtagaagtggtgtcgccctacaaataaggcaggacaccccggagcttgcgtacggtctggggtcgcatagtgcgagatgcggcgaggcggtagtaaaccgatgacacaggcagtcaagctgactttggacagacctcgctcaaggcccgggggccttgttagaagtcgaactcgttaagacgatgacattctgcacttcacacctcgttaaggctcagccacgggcagccttgggtgcagctgttcttcgagacacaggcacaccgagacacgggcatcctcctgggagatacacgggctatctggaagagggtggtaattggctggaggccaccgacgggcctcgtcaaggctttgccacgggcaaaccgtcgatcctgtttagacatcggggaccaagcttggttagtggagagcaaccgacatacaccgccggatggggtgtaattgagggcttcctgtaagtcacggtcggcctggcggagggaggcttcctcaggtaacgcgaaacaagggtgcgaggtcttgcggggcgtggtatacaatggcagccactgcgacctgggtcgcgatcgttgggaaagatcgtcatcatcacgggacgattgaatcgacgtgcccaggcacatggcgagagtcctgaattatcctgtagatcagggtcgctgccaccagaaagtagcgaatgcacggacccatttctgcctgcgaagaccgctaggtggagcgccgttcggccatgtttgtgcctgacgtccactctaaggcagggctgttctagtagttacgctcttgccagctgattatctcagctgcctcaggaatgctcggcagcaagatatcttcccttttcttgccatgtatcacttctagcatgtcctcggtacaatacaaggtagcaagcagaaagagagtttcgtgcctcatgactgatcatgtccatggatagttccgattattgttctttgtggtcttatgcatccattgcgagttgtcgctgggaggtccggccttctttcccggtgttgtatccgcgactgtgcaaatggaaacaacacgttcgtttatatcaaaaagttgcccagattcgacgcccaaccgaattcgaacatcattgcagaccacattgtatcctgaccacgggtatgatacccaatgcgcaatgcttctttatttctcacgccatcactatagccagtgacacccgattaaagtagtctgaaaaggccgaacacaaccaacaatccgggaaagtcgcgttagaacacgtaatcagatcccaactgcgcttcacagacagtattgattttgacgattaataatagctatgccatgcgaaatgatgttactcagctgttgtgcagtcggtttctcaatcaagttgaggtccatgtcgttctgtatatcagattgatgagtttactgttcccgagaagcaggactctcatctgccgttcacgcaatccatcattgttcaagtttggtaattttcatcgcaaatgtagacattgagacatgactaaatgttgtggctgctgtcttgccttcttggagcggattaagccaacatggtacgccctgtctaaaaagcccaggattataaaatgaagaagatgccgcaagaggttacgtgtacagtgagagtctttatcgaatgccatttctatcctgatctcgacagtctgtccgggttcaagtggacaggtccggatcctctgactaactctactcgggctagtgaggttttcctccacatgtcagcgctccttttccctaaagaggtgcaatggatagaatttcgatttgtgcgatttgagcgggtgtctggtgagactataggagaggatatgttcttcctgccgcgggttgaaacggccatggggaatctctatcggatacgcagacagctactagacacaattacctggcatgctgttggtgtaacaggcactagcttccgactgtccctttagcctggtacggaatccctaccgtattcgagtctctcgacgcattctctgttgactagccttccccctaacgctatccctggacgcacggttttttgtatataatatatcgagtaattacgagtgagattgatctgaattaagcgggcttgtttgtatactcattttagtaaagaccacgataatgaataatgactatttgatgcccttcttgttaaaagcctcgggaatatataacctgctttgtatgtagcgtgattccccttgcaatgcgtcgccgcttgtcgtatttatatatttccaatataggacggggtaacccgaaataggcaattccttactcttctcttacgacgtccgttaaccctgctaaattgggactgtaggggtagttccagttatcgagtaggctaatcagttgttcccgagatgattccagtgcttgttcgaaaaagcgcagtcgagctacctgcttcttgtggtgaagctgaagaccgtccctctcttttctcaggtgtgtaccagcctcctttaagatctcattgctctgctcaatcttttggatatcgatgtgcttggaaacgcatgactcccataggcgtcggtagagtccaacgagtcgggctgctgggaatgcaaacttgggatcgtcacgttcaaggtctgctagtaccttcaagatgggttgaaatggctcggtcgccaaagtatgtcttgttactactttgtgttgcgaatgggagggctacgatggtcagccgaagaattcgaagccgaatggtttcacttaccaatggagggacatgatcagaaggatccacattattgcccttatcattaaggattggcaattcattgggctgctgttctccttgcttttcctggtctgacgagctgtttggggagtctatttagtctacagaagaaagttaaggatctggatagtactgtttccgacaagccttggtatctcttatagactatgtagacgcaggtggctacggactgaattttacgatccccatatcagtcaatcaacgcagtcagtttctgaatagaatttgcttttattttcagcgggcgcttggtagtgtatttgagaggaggaatgtcaacgagttggccgggaaaactgatcaagcctgacgatgttgagggccagatatgaacgcccattggcgtgagagatatctcaactagacgcctcttccactttcgttggaagcctcagaaacccggcaaacagcattgcagaatgggtagttcggatagtaacgaagagcaaaatagaacaaaaaaaaaaaaaaaaaacacaatttatcttcgaagtttggtggttatcacttaaattgagcgttgacaacgtttggccaagctttaatgggttgacgggtcatcctaccgtgacctcgctttctgcagtctaggcagacagacccacagcttaccacagaccaacacaacactaaagcgaggccagaaacaaaggtctatgattcatagtgatggaattataggagcttttcggtgatctaacgttgagtcgccaatatataaggtgactaggacaataaatatgtgaatatgtgcctgttattacggattgaatatctcctacaaagccttaatttaagagggacgtgaaggatttaacagtcagccaatattgcttgaccgacttagcatccctttctctcagtaccactcttactcgtctctcgctgggcatctaaaggtatcaagaatatcgctacaaatagttgcagtaaaagaagacgtgggtttcaataggcctcaattgagaaatatatccttcaatacttctaaccaggtcggtgagtgatagaagtcgaaaagcctatatatacgtcctctacccctataattgctctactatttatttacttgattctgtaaagtaggcttattatatctgatgtactcgataagttcccccctttaatcgagtattggagtttataccgtactgacatttatagtatacattgtagactagtaaaccagacagttcctgtactttaagagatatggttctaagtagattcactgccccatttacgctagccgatcggagatatgagatttggattagctagtcaaggcgtctatgcgaagacgtctctgctatagcaagttaatctactgtcgcggctctggttaaccacagatttgaagtgtaactactcacactataggtatatgggcctatagatccttgaaactacactgacccaaaagacgcgggacagccagatccgtagacgttcgaatataatgtaccagagcaagggccactcttcatccctggtcttgactattagaaaatgtgagttatagaattccacgctggtctactagctaataattaatagtgaacctttgggagctcaaccagagtggacctaataaccctgcactaccgtcagtacaaagccatagcttatatactatttctagccctatcgcttcgaacaatgcagtatatcctaggtggaagatcgcaaaccaagatagcgatttaataatagggtgcggagattcaagtgtaaacttagtcgtatcgaagcttaaggcgtccgtccttcctgatagtaagttatcgcgtcttctgctacgccggtccgattaaatataccaagccttgtgcccaaaatcacaataccactaacaccttcacgctattataggagtacccctcatcgacagtgaaatatactgtggcgagtggcctattccgctagatcgaggataagactaaggtggcgggcgaacagcgtactctatcgcatcgcatcttctgccttcgtccccaccgccttcgcactattaaggagtcctgaacctctggcatcgcaacgcgtttatccgccatggaagtgcaatatttatcgcgggtgggttcgtaacgcgcgtttactgtctcaacaaattgccttaggcaccctagcgcggcttttttgaaatgagtgcagattgcgataagcttaaatgcgacgtggtatggctggtaactgtattgcagagagttgtaagtgatctagttgtaaagccgatataaccattatacaaactgatcgttatatctcaagcgcactttgggattcccataaacaggtacactacgacagctcgtctaagatcaatccttgctaactcgaatcgtacaataggaggacacccttatttctgtcacttgagtcgaatgccacgcgaacaaatattttatctattccagctcccctatacaattacgattatatgctctctatcccttccacatgaatactatcgacgatgagttaccagaaagttcgtatcgcgtacctcggcctctgtctccctattaattctgtgtattaggtcattgttcgagttcgatttatctatatgagataactcctgaattccgaccagcctatacctctacctgaatcatatatatggccaagcatgcaacctttcaaatcttcaagtggcgtaggctgctagtatcaaatgcgtgatcctggttgtcttaggatgacatttagtgtctttctagaactggaaaaaaagcataggaatgctgatgttttgtcttgcttcctggcagatgagtatacctccgcagataatcaggctattagtacaagtccacctacaaggagaaggagacacaaaggcttcccatttttaacctacaatttaacattagttatctcaggtacaaatcgagagggtaagatcggggtataggcaagccaatgagagctcactgcctaagaatcacctcgagtatacaggaagctatattataagggctgtcaaaagtactgtggtgtgcccagtaggttcttatgtacccatttcctatctaagccgaagcactatctgcaaagaccatttaccctaggtgtcactgcagctacaggttagtcaagtcgactgcgcatatcctttatccgtttatatcgtctcctaatatatcacgcacttgtcaggaaatccggattccctatatccctatttcgacggtttttttgagaataaatcatatatccgtcgagcccaccgtgccgcggaggacacacaggtatgttactgttcagccaggcagccactgtaaagactttggtgtccgaaataatatcgaatcagaatgtttataggacctcttggactatcccctagatcctcgagcaaactttccactgtcaatcaacgctcatgtgatggttgcttttggaaggctggccagactgactactacgactacgagcggactagcactcctgcggggatatcacctaacggaaattcgtttcagacggtactgctagaacccaatcgggtttcaattaggtttcaaccgtgttctcttatcagcagaatatggttgattgcattaacttaggacactacttcccaaaaggcaattgccgtcacttcgatccaggattggttgaaatataatccgtcgttaccgaggcatagtaggagccaaccgggtattcttgattgcttgcttgtctaaatctcttagcaacatggttgtctctgcggtaaaattactttgattcttgcgctctctaggatatagtagctgaaatagggtaaggtcgagtgactcaatcgccgccttaagtgatggctttgacttcgcaaggcacaaagcctaccgtatggctaattttactcaagccattcgtttggtaccttatcacatgcttctatacgtgggtcttaggcgtattgcttggtcatagttgaaccagtggatctactatcactatcggattgaggctgtatgccaacttcaccgagtgatcagaatgggactagaattttcgcttacgaaacagaatctatagtgattgatacatttatctatgtgggtgagatgatatgaaaatctccgtactacgtctgtgagacattgatagacctcgccgcgggccatgaggcccatggattcgcactgaactacttccccctgcctatgggcgggcgggcggttgaccgtagtcccgtgttatttaatgggcccatgtctcgcttactaataagcacttcagtcatatgaaattttataattttataatgtttagccacgtacgcatatgtcctatagtactatgtattcaggttatttgagtagaaagtatataatgggtgtgttcagctataactaaacctagtaaaatcaatggactatcgagtctaagtgaaattgaaagtgtggtccgaaatgcaaagaaattgtgatgcgtctgcattgcgtgtaaatatatatattactacaaaatatgctgaacctataaaaccactcacaatataatgcctaccagttgcatcagtaaatttattataaatacgacatattagttatactacatactaggattcacctttattatgatcaattatctgctatactagtggttattaggggtaggtgacaagtgatagatttccaagagttgaacccccctattcaggaaacttatataatctgagggtggcatggaccgatggcaaggcctagacattgaccacctttttcaccgcccgatcaacacacatcaacacttaccaacactcacatcaacactcacattaacactcacatcaacactcacatcaatactcatatcaacactcacatcaacacttatatcaacactcacatcaacactcacatcaacactcacatcaacactcacatcaacactcannnnnnnnnnnnnnnnnnnnnnnnnnnnnnnnnnnnnnnnnnnnnnnnnnnnnnnnnnnnnnnnnnnnnnnnnnnnnnnnnnnnnnnnnnnnnnnnnnnnnnnnnnnnnnnnnnnnnnnnnnnnnnnnnnnnnnnnnnnnnnnnnnnnnnnnnnnnnnnnnnnnnnnnnnnnnnnnnnnnnnnnnnnnnnnnnnnnnnnnnnnnnnnnnnnnnnnnnnnnnnnnnnnnnnnnnnnnnnnnnnnnnnnnnnnnnnnnnnnnnnnnnnnnnnnnnnnnnnnnnnnnnnnnnnnnnnnnnnnnnnnnnnnnnnnnnnnnnnnnnnnnnnnnnnnnnnnnnnnnnnnnnnnnnnnnnnnnnnnnnnnnnnnnnnnnnnnnnnnnnnnnnnnnnnnnnnnnnnnnnnnnnnnnnnnnnnnnnnnnnnnnnnnnnnnnnnnnnnnnnnnnnnnnnnnnnnnnnnnnnnnnnnnnnnnnnnnnnnnnnnnnnnnnnnnnnnnnnnnnnnnnnnnnnnnnnnnnnnnnnnnnnnnnnnnnnnnnnnnnnnnnnnnnnnnnnnnnnnnnnnnnnnnnnnnnnnnnnnnnnnnnnnnnnnnnnnnnnnnnnnnnnnnnnnnnnnnnnnnnnnnnnnnnnnnnnnnnnnnnnnnnnnnnnnnnnnnnnnnnnnnnnnnnnnnnnnnnnnnnnnnnnnnnnnnnnnnnnnnnnnnnnnnnnnnnnnnnnnnnnnaagagtaaaatagaaaaaaaaaaaaaaaaaaaaaaacacaatttatcttcgaagtttggtggtcatcactcaaattgagcgttgacaacgtttggccaagcttcaacgggttgacgggtcatcctaccgtcacctcgctttctgcgctcaatcaccacacacatcaacactcaccatcaacactcacatcaacactcacatcaacgctaacggttcaacgcaacaagcgttcctagacaacactcatctctgtttgcctacatctgaatgaaagatgccaatttctattgtagcgaggaagttattggatcacaagctaccaagggaaaaaaatgtgaaatacgtcatttgatactgaagacgcttcaatttgttagtttatgattttggctgttgaatcgacgaagatctaactagggctccttctatgtatccaatgatgacccttcggaacaatgaacagacgatgaagatgttgcgcaggtctttgcttcttcgggtactcttgaatactctaatactggtccctagcaccacgaagaggtgcctgcacgggctagagggactttttgtcgcagatgtccctgcggagactcttggtttcgcagatgcccctgcgaggcgctttgttgacgcagggcctaggctgcggagaacttggtaatgcagcggtctcctgcagagaacttgttaacgcagcggtctcctgcgggtctcacttgtcatcacagcgtccccctgcggagttcacttggtaacgcagcgcccccctgcgaggattgttgttcacgcagacctatcctgcgaagcacctttttacactcgcggggctcgtggcagcgagggagcgcaagtcttacatcactgggcttgtggcagcgacagccgtggtcacggagactctcaagcccgcaggcaagagagggatactatgacataccggagtgtgaggaccgaagtcctgaatttttttgggctgggaatcgggctccttttatatttttcggctacgtctctaccaaggaaccagttgcgcagttggtagtgagagtcacggtctcgttaataagcgttgaagtaatttcaacgacgttgaaggggtgtttggagactttgtggcctatagactcaagtctcgacctggcctacttcctcttaaaattgtgcgttgagtatggtgaaccactttcatcaactgttgaaaagaaagcaacgccgcaaacgtatggttcgtacatatcatcgaatttgcaattaaatcgcttaacgcgcttacattctacatgtccccattttaaccacggttaccatttcttaatgagggttgaagtgcttcgacagatgccgaaataatgggctgtagactttgtggtcgacggaaacgctgagctgtacctggggttggccggatgacattttggtctcactagagtcaacccttcatctctaggctcgcgccgctgacttttatttctactcgcagctgacttatgttgtctttactaaatatctactccctgggcgcgtaggccttggcatacttgcaatctcaggatgaagattgtctttctttggcatgatagccaaaaagggcccagacctttgaaaagcttagacaagaaactgggtctagttcccaggataaccatgtgaactgatgcaaccaaggcccacgagctaggttctcgtgatcgccactccctcgcaagattgcaacgctactattatactgatgagaccctggagacgaaaagcacccgaccggccaatcaaacaccacgtgtgaattcagatagacgcaggtagggttctgcgatgcagatctcagcgacgacccaggggacagtagatcagggaggctctatttgtggagagaaaatggaaataattgcaaaggtccagacacgatccataagcctaaagttggctgctgtcagggtccgatggaacggggggttgttgcctaggcggtactgctggggcaggtgagtatttggaataacacgcagactttggcgatacaatgataggctacaacccgatccgtggttgtattcttggtcgcagtcatgagaaggtaagttcccctgtcaagtggtaagctgaactttgccgatctggtctgtagaacgttctagaagctacgtatcttctcctgcaataagcctttctccgatgattattgctctctttggaccgtaacaacacttcctctccatctctttaaatctaccgctatttcaataactctagcacacggcttgtaaagaactatgccaattatggacaaaccacatgagcttaaataaaatgcctccgttttactaaaaccgattggtcccggataatatttcgatgtgggccggccctcctgcggccctaaaccttatttcaatcgatctgcatatcttgatcaagatgctgaatttaaagaaactttctaataaaatgttggccttgccgcagtaaatttatcctatatactgcctggcggagattgtagtgtttctattctagttctcatttttgggctgtaaggtttagtcacgaatagaccagaaagtgggtagaaacctaggcttgaattcttcattaaaaccgcattctctcaccgagcgagcatttctatggtttattacaataaactctcgaaatgatttgcagttctgctactgatcggcagtcccgctcgtggttccgcagtctgtgtcaaacttaatttccttgtgactcgggcgtgggttgaaagcagatcggacgcttcgctccacagatcacactgttttcgaccaccgattcaatcaaaccctgccaggtatattttactgggctaacaagatttcagtgccagagccccttcctaccctgtcctatctctctatgggaacgcgcatagtaccgtaaatccttatacactgtccgcagtattttgtaggccacatgggccatgcccctggtttagaatgacaaggacgtgtagctgggcctgctcagaggtactacgaccatgctcgaatgttcacctttgactttggaactttcttactactgttgtaattccaaataagggtgattgctccttcctatacgaaatccatggagtgattcatatctcttatgctagtgtttattgtcgagtaagcatagcctttatggtaataatatatacctggactattttattgaaatagttggctactgttccttcgatatagcaatgtcgcgctccgtcgatgatatgctgctagtgtggacgttctgttcgccggtatctcagtttcctggcggcacagacacgatatatatagtcctatatctaggacgacgattgtgttctttgaggcgagtacggaagcggtgctggcgtcacgtagcctgtggcaaaaggtcagcctcttatataggaagaataaaagtattttatacgtattttcgagcgtgatgtttgagctggtttatcgctgtcgccagactggctagggtcggctgttagaattgtttgaaaccgtttgttaatgttcctttaggtagaggtattttctggtagagttgactgtgaaccgctatcgactagcgagtgccgcacgtcgcctgggcgcttttgtctgcctgaatgtccgggaactttggcgctagtgcgatgctgcttccgtagaatatggtactttttcccttgtaaagactcaacgcttcgatatacctgatattcttcataatatgtatcggagagggctttctacgataggccccgatgggaatccagctaagagagaaggtttttctcttcccgttctggccagctgtatgcgctacgtagggatatggtgatgcttgggcaagtcataaaagtgggaagaacggttgaataaagcagtagaaagtgaattcgaagaggaagggttattgagtttaaaagatcatagtattgtatataaatatggcgattgcgtttatgagccatggctcagcttggtgaactggtaccagactcttacgactcgccccagctaaagcttctgaaggccaaaagcctttaacttttgatgtactgtgtttcgttaagaatcaataacgttgaatggctaccgtgtacctgttaacaatataatatggttctaccagtttgttgaaatatatccgactcttagtgagccatgtagaaatagaatagatatctacgtgtagaatcagaatgtatgggtgaaaaatgtgtgcgcttgcaattcctgttatagtgagtaagcataacacttaattctagtcctgcgatataacttgctataaagccggagtgctttcttctatcacacttaaccagaagtaggaatacttatcacctcagtgtaactcagacgcagatataggcggaattcgaaaagcctcgcgccctcttcgcaattcctgttatagtaagtaagcataacacttaattctagtcctgcgatataacttgctataaagccggagtgctttcttctatcacacttaactagaagtgggaacactcgttaccttagcgtaactcagacgcagatataggcggaattcgaaaagcctcgcgccctcttcgacgaccagactttcggagcagattataacgtgcattgtctttatcgtccttagagtctaaggataccggtagtgtgtccagtaccgctataggggatataataagtgacgagttaccttcttaggaggaatacgactccggcgactaggaaaatagtgacgcagctgatgagagtgagtaagaagctatacgatagtagagaactgtgtttggatatgaaacggacttaggaatatgtgggcaaactcagctatccggagacagtaatacagttgctcttgaacgcctaacagagtaagtataatcctatacggatataattaagaattggcctactaataatatctagactagataaccgaatagggtgagctgctgtcgatactgagtgagagtgtaaagtactaaccatctctgtaggtctattgagcgcttattgtatgactaagccacctggaataaaactattcgtaacaatctggtcgatatcttaggccgattggcaattgttgagactgaggtacagaagttaaatagataaggtacaaacaaatctacagagggctagaagaccaggcgatccctgcgtcggtagcagtgatatgacctaaactatgttttaatatccgactagatattctagagtaaggcataaatctatattggtcttaagttatggatacgattcttttactaactgaaaatattactgaatatagacacttttattatggacgctgagttggagggttattagaaaaggtctgattgacctaatacgagctggtactagacgagctatatatagtttatcgttgtatttaggtcttcgaattttattaatacttgcctagattgtgtatactaaagctatcttacccgagccgagtggctatagtcgcgatctactatatgtaaacgagtactttaagccttttattagttctactattgcagatgatttgtactatctagtctagtatgattgtatacggtttgtataactgaagatataccctaaaggctaaagctacagtagtatataagaattatacgctatgtaaagatgattgtatattggttacgactattaaggtacaatccttcgtgattgatactagtagagtagttcaatgtgcctagtagttgagtaattgctatttgtgattgagttagatcaggatatactacagtaagctttagattgaggaatgagaagagataacaactgtagtatgtaagagaagcggggatttctctattagacctatagctataaggcctagtattgtcctgattagactattaagatgcattccctttatatggactataataaatatcaactctacagactagcatgccaaggtctttcctatttctgaagggtatctaagcggtgtgatactgaatctaccaggactgcgtctctataagtatcagtcacacctacttattacatttcttaatatataaaaaacaaccaaggagtagagagtggtgaacccgctgttaacctgcgccgaataatgtatcgagacgcctgtgcttacttgtactggtggttcttggactaaggcgcctagcgatattcttcggagtaagaaattggcaatatatatgattcgtaatcactacccttagaatggtttagtgataatgttgcaggaagcctgttcatgagctatctgcacgttaactctatttaaaaaggcaattctatccacaggaaattaaggcctagtaagtccaacgtagatattcgtttaaacgagagatctgaattggttgtgcacagacggttcctgctgactaggaagtgggacattcaattcagagatgctgaggtaggtatcgtggccctgagtagccgggccgctttgctcggccgggtccgtgtgagtcaccccagagcctggcaaataggatgccagttatctgttctagagggtatcgattgtgttctaaaatcgagtggttatcgataccatatccccgtgtgcctaatctagaaccagctgaatatcattctacagtacctgatcctgcagagcggcatttgtggactctagctgctgctgcaacttacagatcttgtgcccgacccgctgactgtcagctaatgctgtatctcttactgctatagccagctgcaatttcgaagtttcttcggttttctcggctttaagttgttctagtaactggtaatgtttgtgtctctcctcttctctctcctcctgtgctttttggatctcttccttaacgatgctcattatatgaagacatttcctataggacactttattatatttccgcctagggtttcgtgtttttgtgatagaggatgcctaccatagttagttaggagtacgttaaggtagttaccagggcaataggggcaatgttggccaaggaaaatccagaaaatattgtggaaggtagagattggtactgtatgcttgtgtaacccagtcgccggtttgagagggttctgattgtgtttcgatctagaccaagtagaccgaaggggataacaggaaggcgcagtatgcagctgtactttactacagtggtctgcctgttcccagaaagccttgtgattctttgccatgttaggtgtgctcaatcgtgagattaataacgactcgaagagatatagaaagcttgaaagaaatataagtagtgagttttgagaagcttaattatataggagtatgcggaggcctaagcgcaggacttgaacctgaatgaagccgctcttgctcctgcctaggaggtatgctaaataagggttataatcctaagaaaaatgagtactgggcgttaatacgaatgtataaaacacctaccgctcgattatggagggtatgagcaacaggtccgtacaaatatatatgttggtgtatacaaccctattttatgatagtaaggactaatcggccacatcctgcctaaagtttagtatttagacaacaatgttatctttcaaatgctttgtgaaatttgccgactcccacgactctatattggtcggccctaaaaaatagcggccttgtttttccgaattaagagttctcactttcctgtccgcatatatctggattccccaataagccgttacttgagttatgggggaaaggcatttcttgcggctaagactcagtagtaagggtatctatctagtgtccactatattatagatatgcttgggggcataggaacctctagtgctacgaatcaagcggcagttatagcaggtacccgagtatgttataattgtcaatttaagctacggcatgggcctcagccttcaccagttgaggttctactatcaagtacctaacttgagactcctacagctcacttccctggtaggctatgatcacagtctatatatactatatatcacgataccggcgattatttgagtttaaatgaatttggtaccgaattgtaaggcgtattattggagtgtaatattaacgctatctttaatatatgataactagggtactcagtaggctgttagcgcatataggatctctgttatgtgctccggttaatctaagacctcgcttactaccttatggatgccattgactgacgattagaaatcgcgggtgctaagttcgatcctaattccctctgtttgcaatgagtttaatatccgccttactctagtaattcctgctttcgcctctgttaacttattatgcagtttcttattgtgcgaccgaagaatttgtatatcgtggcggagtttattggcctcagtccggaccgtgtgactttcgttaagacagttattcaatcgggcataagtgcgttctaactcgatttctatgctgttattagcagccttaagcttagaaatctctgctgtgaaagaaccatccattccgtcaccaaaactctccgcctctaggctctgttagcaatgctgtattaataaggatgtctagtaatgcttacctcccttggaatacagcttgtatttgactgtgagtgtcctaacgcgtgcggggaaacagcctcgattgaatggccgatcttattgcaaattttccggtaaagataaatcttaccgctacttaagctagatttaagcacactagcatttgcgctcgtgatggactaagcgtatccatctttaggtcgcggttggagacagactttttcaggagcaactacgatgccaagtcggttatctaggagtattagctgagttattatcggtagggggccacgggtatatatattggccgctagggcttctcgatattgctgatttagttttaagcgcttctcgttactacgcttaggtatcgtagggtaccttcagcactcaaagaatattaagggaatggggacgcgggtatttaaaatatgatttagaactgacccttccgctaaaacaccggcttaatgtaggatcgatgattcgttctttcttaggtcgaaagtggtatccgtgggtagggcctaccagtatctattaaaattaggtaaataaagtttcagctgaaaacttggattagttaagatttggttgaaagtcgggtataagttttattgagaccttattaagtaaactgggctactgaagaaaatataggaaaaagtaacctcaatttctgttcaaatatatcctcaatcactaagttttggtcggcaaacgctagaattaatttagttggggcgtcttcacgctaccaaagatttctgccttccaaggtaccggcggaaccgatagtgacttaacggagggtcgaaagctgatgcgactgagcagactatcgggttcgctaataatattcccaaagacccagcgaatattagaatatatatattgagtaaggttgggtcgactctatatactttgcgctacctatctgttaaaattgcaatgactccaacagctcgccggccccactgccaaagactagcgagcgaccactatctgacgccattactgtgtgactccttaaagcttctgccatcaaagatgatcactcgccatgccggtcgtaacattcgaactgactcatcgagcctaccttcgcagcgagccaagaaggtccttaaaatgaggattcatcatcgatttcatggctcgcacgttacgttccgaaaaccaggcagaccctaaaggaagggtgccaaagaaagcccgcgccggaagggagcgatttcggagcgagaggctattcgattggattggatagggcgacttcgtcccaagccccatagacgttgttaggtcggacaaggatagggcaaacataaagccccaggggttggcatgccgcatttactaattttgttcatatatcgttgaatagatgaaattgacttgcaagacaatgagtatgataatgcagtgcgtgatgaggtagcccgtaaacatggactctatgtaggggattgctcagctaggcctcctatcgattgatataggcaaaatcgccagtatacccatgctttcataattgctgtgtattaccaagttgttctgagaagagatcatgctactctacatgcactgaagcaaggagaacgcagtttacggtgtagatagagtccatggggcgtcatgttctatttttctatacctaatttagacttgaaaacgatccgttgcgtgattcttgtgaacattttatcttttagagacagcacgattactgtaacaaactcctggtttcaatggtcttgtctgagccacccgtccacataccacaagctagttggagataaccaaggatccacctatttggctcacgggattgactgcaaggatgatgcccagatggcgatgatgaccagttcgacctgttgagtgtcagcattattggtataacggtataacgtgggaatctgcaattacctccaatgcaatcatccacgatctctctaacataccaatgacggcaatcacaagcaaaagaagtgccattgcagagagataacacgagatacactgcagcttagctcgaccggcagttgactgttgaaacaactaccaataccatgtaactacacaaaggtagtccgcgaagagaatatagaggctacccagataagtagattttaaaaggaaggttccaacgagggagactgctattttcgctaaagttaaagccacagagaaagaagggcatataaaacgtagtaattgaggcgtgagcgggttttcgcgctactggaagattatgcggatgtactgcagcattgttagttagaactaaaacactgtatatgaccgagttcggtatgctgtgagcttaccgcttatagtggtgggaatattggggtaatccaaaagagtacttgactctatgctggaaacctgttgctctagaacaacctagcaagaatagtaaaggaactacaagataaggcacacagcgctaaatcgactttatactaccgccagtgtggttggatgtaatacaaaagaaatagtctcctaaagttaagaagtagaagaatagttactaagacggatctaatgatattttgtgaaaccataactatactggactgccagctaatgttcttgtttgaacgaggccttgagatttatataccgaaatagagatatattggccaggtaatagtagataaattcctaggatgtctttatttgactctaggattttcttatactgagtttcctgcctataaaaaagcagatgcccttaatcttatgatacagaaggttaactgaggattcttagttgcggcttcggggcaatacttttgctctttttctatgtagacccgagaatagacatcacatttaaagcttgtagtatagtttctgatttagcttgtattatgtaagactatatttataagggccaatcacagttgtagtatcctgcttttatatagatatcgaggatatgcagaggtggtgtatatatttataaatacctaacttaatttctggagagtactgccattctcttaggacttagtcttcggatctatagaaaaagtaaagtgtatactcgctataatatacctggaagtcatataatgttttgataaaatagcatttacctttaaaatggctggaattagctatagagtatatagtgtcttgaatgagtacatcctaagggcagtttttatgtaccgcggattctctgtgttagtttcagcagcctatggttgtctgccttggacggacttattagcttatcgtgattacttgttcggccgaaactgtaactcgaacctttgcttaaggcttataatttgatgatgttttattattagcaaaaatgatacgtgtctcctttctaaagggtgctgggatcagaaaatgtggagaccggggttacaatatccgttcaccgtcataatagtatcttgctattcgtcggcatactatggaacggagcaaaatggatagctatatcactaaaatattaaagtaagtgagatatgctctatttatgggttttaatcgcttataatttttactggcggtctgaagtgcctatatattgtgttggccgatgagtagttgttctaatgaagttactaaattggtaatgatatatagattgtgtttcccttttcttacttgtgttagaaggttccagacaataggttatataggatatagttaattggttcctgtaatctatagcatgcgatgtgtaaatgaacgtcgatagatgtgatagaaatacttctgctattttaggtaaagtcaatccgctcggaatgtgggactttttaaattgattacgtttctccttgctcctcgaaaaaatatacggaggctttcctaactaagaaataaaagttaatgatataaataagagataataatgaaatcgaaaatagtatctagatcaccgcgatgtagatattttatatggtgaataagtcacgcacttgaatgttaacggcttatctagatagtagaccgagataaaccgaatgatggataataggatatgacgtttcatgtgtgcgagactttgtagtctactattgcctatatttctacatactagtctatatcacgatatataaggaattgctacctgcaataccgctttggaatactctacgaggccgtatgtcaagactaagtacatactatggagactgggctgctagaactggactattccaattctcttaagagggcgtaaagtgtacagagcacaactgtagaggttgagaagcactaatctgccgaatgcagtggccagtggagagggagtgtggagcggcttggcgaatgtgtgaatggatggtactaaggccaataggaccccaatgacgcgaattgaagagataatcgggcggaaaatgcccctatgtctatatctttgagataaatgtcagagatgcctccaacagcgatcattgtgaaagccgatgtatacccaagttgtagcaatggttgggctggaaagagaaaagcgattgtgggaagagctgcggtctaaaccaggaataaaccacatacagaatcttgctctttcgtcattttctccttttggaatgcactaaggctattctgaaagataatatatagataccatatggcgcttcctctaccaaacgctattactgctagagcgtatgggattgactcttgagatgaggggaaatggaagatcaagaatattagtagataaatgataaagtatgagaatctaagcgtgcctatgatgataccgatggcgtagctgcgcaggttttggtaatcgagagtgtttattgtataaagttagggtaagcaccagccttcttgaggtagcattcctcgggcgagcatttggctttatagacaagagtggagctcagcttttactgtattgactgtgggtgaggtattgtagaaatataagtgttgagataatgatgggggcggcgttgatcactagaatagtgaggaaccattatatctgtaatgaccacccaccttaacggccggagccttagaaatgagcgcgtttatattaagttgctaataactgcttttttgccttatcgatattcaaccagaccgaccgacagatagacctccgtggctatgtaattggtgtctcttattatgcaaatgtaggacctgtgagtcgattgtgattcttcctctcttctatgatagcactatagaagatattgtaccgattgtacgctagatcggttaataataagctcataatgcttattatcgcgattgctattccccctttaagctactctaagagcttatagaacatacgttcaccgaactataaagactttacaaatccggtaccgagcgctcgaccaattctgtctattaacttctccgaaattttcagaatacaatctgtaatctggttgaaagagtatacgaagcctaagcggaatacgagaagttctgctcagtgaatgaatcacacttagtgcgcgttgtcttcgagcctattaggagaatgtatactaacctataagtctcattgcagggtataagatgatggtggaactactagcctagcatcgttgcctaggaagacggatgtgtacgactggtaactctactatggtgatatttttaaaggcgggatttctgtaaattctatagagccgcgtgaaaatcataatgtactttgtgtaccacagtatttctctctaaaagcttatatactatgtaggagcccactaatacaaagctcttatgaattagacacagctatcaagaagttccgattactacagaatgtatactataaaggcgagcaatatttagccccactatctgccactgtccttatatatcatttcccatacttctagccgaatgaccatctataggcttagcaattagatgtaacagcagaaaagatggactaaccatatggttgaaccactaatagaaaagaaatctgctaaccatactgtggtaaacatcttagctccaagggtaacttcgacaccgtaagtctgcaaggtgctttttatcttcgaagtaaaaaccccatacatcactgtcaccacaaatgtggcagtcgtaatcagcatcgacgaaagcttaatttatcagtatgtctcttcaatatttgtccaagtatcacatactgtgtaaaatatggtaagtgatctgctgccttttgaaaagaaaactttgcgataagctaaaactccggataatgtggttaccataaacccagcaatatataaatagactacactctgggaaaaccgtcggtagccggaaactaagcttaggttaatatctggaagtatattgctgagatttatggatgtggaatcaagtacggcggataggtcaaaagtaaaagaggtgctggggtcagaataaactatctccgagctatccttggctttatagtagttccagaggccaactaaatagtattgaggcagatgtgacttaaattcgtgtacctaggcttcgactatgctgctggcagctgacgttgcctcatggattgcttcatttgcactggtatggatgctagatgccatgccttcgacggcatttcttcccttattctcaataagcgcagtattaacattgaatgggtcccgaatttgtaaatcacgcagctttagaaattcttttaggtctacctgccgattgcttagcattgattagtatggaagtttttcgggcgtatcttacttttagaaaatgtagacccttcggcgaggaagatgacgaatatccgataaagataagagatagatagactagaatggcgacggtaaatgataatgctatggttgaaactagcgaatccaatctgctcttggtggaaagctttatggctttagaagggagaagatagaggagtgtctcttgaccgaataatagactttaggatcgagagaataattgagaactatgctgtatcgcaatttagggaagtatatatataagctttccagatatggttaacttaacctgtgtgggcagtgttctgcaaatttaactgaggccgtcgcaattttctgccttattctatgggtagtagtagataaatgtgttaggtaaactactagtgaatggggatctataatacataggtgttgtgagggcaggtagataattgatagtattaactaccggaatatgagggcatgtaattataagtgattaggctggcgagttagatcttcggcctacaattattctcagatagatttaataattaaggtggtataaatactactgtatagagtgaccctcgatatctaagttgtctttcttattattccatatacctcctcacctataaatcacaggtgacttgtactagatcccgttatgttattttctaggcagtcagaagttgaacattgggagcggaaattatatgactatcgagaaagttatttcgagctatctgccagagtgtatatctcttacctcgtcttcgagagtgggtttagaagacggatggatggccggcagaatatctatcgattaatacaaatgatgaagatataaggctgttaacgcttgatgagggacaactacgtgccggtgatagtccctagggcttattggtaagatcgcgtgcggccccgatctggcggtggaatcattcttagcttagatatagagctagactataggttgtgcgtatataaccacgagaaccttataacagctgtaaggaatttccttgaccacgataattagtagtggattgtagatatctatctaatagataatgaggaaggtgcgtttgctcagttttagttcttagagattgttgttgataagtttatagtgttaccagacgaccatagaaatgaagcggagtctattcgtcataaattcatccaattactgaaggagcggtatctaaacgacaatcgcccacctgatggactgatctatgagcggattaaccggtacgaaggctaccttgatatgcctagggatccgcttgctgcgaataactggtgggctgtactggaggcccttgtgggaagtaagaaaggaaagtatttgaagcaattttttaaatatgagaccttatactaaaagctaaattctttgcttattattctgggtctctggggagggatgcggattgggctactttataaactgacagctatgtattgcgacgaggtaaatttactctgaactataaaaccagttctatctcagctaatttgattgtaaatctagccagtagtatgctactgggaattgatcttctctactttttcgagactggttggaggaagggaagagcttttattgctgattgatggagttacagtcgagctgcttcaatctcgcgtccctaaaatctcctataaagatttgcaatccttgtaggttgagttggaggagggccgggttttcccgaacttcttggaagaggctcggtaggatatatgggcgcgtttgaaagagatcgattatccaattctaaccttgaaaatattttttaaagatcggctctatcttgaggtggctcaaagtgtcataaagagactgttcgtctagccgcgaggggataagattactattgaccagggtgtgtatgggaagtatgacactccggttcccgtctcgatggcgctgagataggaatggttaggatccgacctgctcgaattttggcgctttagcttctagtatggatttgaaatgaccgattactaatgccttaaatggccgatagacgctgatcccgaggatatgcttgatcggcgaagctccggatcgtcctttcttcctaagtaggaaatatggtgccatttctttacactggtgagagcgagaggtttctaagtacccgtcacagacgatatgttatttgcaataggggagctaccttcccctagagtgtgcgaatttctagaagacttagccgaagaaatagaagttgctaaaagatgtgggaagccgtactcgaacactgttgaggcagatcgattcgctttgtccgcagagacgctgcggtaaagtcaagcctcggttcgagtgacggcggggtttctccgatagtctgtttttaaggcgttctttgctatctgtggaatagtaatagttaaatggccggtggtgatcctcctgacgataatattgaagttcactagcgcggcgaaaggccgactactgtaaatgttggtcgggctatgatggccatagacggtatggatgtggatcctgggagccttaggccaaaccctcttgttactttagtagcgcggatgtataatgccgcggctactgcttcactagctgatatactgctgccgttcggtgttatgactatcacggttggacgaactatatgaatattagacctactaatccacgacttatttatgaaagacttttcgactggtctatttaacaataactttaatgtctagaccgatgagagggaaaagcgatccatttccctatatatgtgctactcttattatctgtacaatccgttgttggtgctatacgccgaatttagacaaaatgagtatactacctacgctattgtaccctcgtaaatcggcgctgggagtaagagaaggatgcttgatgaagacgagcagatggctagagcggaaatatggttacaggagtaaattgcgttgctttcggatcggtgtaacggcgacgaagacctttgacgggaaaggaggtatcaaatttgggtttcactaaggccttgaagaggctcacggtatagaggaggcctggtatggtagagatggtatgagtgaggtatgtaaaaattcatatcttatgatctattatatctcagagcatgttcctgtaaacggcaacgttttagcttgaagcgagtaagcctatggtatctatcttatatagtgcgaaggaatagataataatgtacttcttgatttattgggatgtattgtggttcgattaattatatttattagatatgcgcttggtgtccggcactgatcgttatttatattttacagctgataattagatgtaagttctatagcctgaggaatctcaatggcttcaactattctctgatttatatactcttcttctatttaacacatagtgttatacttgtagtttactctctggccactattaagggttctataccatatggcgtcgctttaagtttaataagtgaggtgctgcctcttttatctcaatggactatggtacactccgccgacttaaatacctttgttgacctagaggcgcaatgataaagaccaccctcacgatggtccgcctccctaaatatataattagataatataacttgaattcctaattaaagagtggcttacttgataaggcaggtatttaggttgagttccccagaacccttcggcgagggtattgtggtggggctatgtgtctcgctaggtgcgcttggggatgccgagatgcttgtaaagcttgatgtattcgggagctcgcagctagagctcgcagtatgggtagtagacccggtactctcggtactggtgcttgtctgttgttaagtgctttcgcgtcttgtagtctctttattcagtggtggcgattggtatgaataattgccctgctgttgcgagggaaccttattactagctgccctttctgtatgttgccttaccgaagctattaggggaagttgattgtctagggagactgtaatactacgacaatcgatggaaggcctattaatacctgtaaaggttagcagttaggtataatgcgagggtagtatgatacctatatctactgagtgtactttctatctcagcctcgcagttaggtgataaggaaactgattgtgtgtgtctagaagttgaaagtgtggtatttaagcttccttttatagcttggtgctatgtgctgactgtattatatgtgaattgaatgaggggcctaagattaagggcttgaatctgactgaggatagcgatgactgtaagtagagacctgaatatgattaaataactttggtatttaaagacctggctttggcgggtggtgctgcgaagcgcttttatattattaaggctcgatgagtatatttctgaggtattaatttacctaggaggtgtggtaatcctatgaaagtaaaagaaatagagaagaacgatgggtggtgtattattatgttggtattactagtattaaagaaatgccgatgatattgaaaattgatgctagcgggagaattaactcttaattttgggatagcacatttgtgcctgtatggctcaatttaagattccctgtgtgtgaagctataactttagaaatatattatttctaagacctaagagatatatattatcctcgatctccccctctttaatggactttgtctatttctaattaacgtgatgagggccggtatagattctgctagcattttgttgctgcttctcgctgttttagtcgtgagtggctgtatattcgctctgtattatgcgagttttatatactgactttcgataggttgtaaggccctatgatgacccgatctatacagcaatatctacctatctagtgcgatccttagaaagcgtatccgcgactgtgacccgctgacgtattttctagtattattcttcgctaatattcctactgccgaaactactgtatgaaatgattatagaggtcggtccctattattgattgtttgtaagtatctaatgattgtaatagtaaactccggcttgtgtatatttgcacggaattgcttatatggacgctacgacggagaacattgaccacttgagtaaagtcagcgaaaccttgtgtaacgttaatgctggaaattgttattgtctgttatatgctaacctatctggtatattcctttgcaactatgtaagtgctctaaactttaaggtaaatagggctccgtgctgacggcactaagagctacgagtgtatcttaataaactgtggaagccttgtgctactggtgacaaaggtttaagaaatatgttaggtcgataacttttatacgtttggaataatcggtagctcttcttaaaacgcgagtgactcgattgacttttacttggtagttgtaggcgaatctatggggtaacctatagagtagtttagacctcttggccttgccactgagtcggattggtatttgaggtggactaattaaggtgctgccggagtgtagcacggatgtgattcacatttccgtatatatattcttttagaactcttaaattagggagctgtttttcctatgtacgcgcttgaaatgagttttactaatttgttctctttgattgcttctctacctctaattttattgacgctaggcctaatgtagctagtgaatatttattgccctttttcctatttgatatctattgatggggctaggctagatgtaggccgaggtgatctgactaagacttaggaaagaactaaagagaataaaatggggaaggaatttctagtggacctggaaagcttgtgcgttggtagtgccctttctttaaagtatctaaggctatcgctacttaagaagctttttataatgcttggaatagtatacgccgcgttgtattgtaaaattgttgaaaactagtactagccttaactcaattattgtgcttatgcttactgtatgaccgatgagataatactttgatagtacttctgcctaaaatagctaaaaagcataaattaaataatgttacgcgcgtagggaaggaaatcggttagttactagagcggttaaccctggaatattcaccctatctctattaactggccccttactatatttctcgagataatgctgaactaataaagatctaattaaatatatctgccttagggatagctcatttttagttatctcctgcttgtatataactacctttgatgaactgtttcgagatgtcagttcttcgagctctgcttataagaatgataagtgtgtataaagacgcgaaatctgttttgaattttgataaacagcctgactcagtcgttttaatttgggccagcctcgtctctttagagtttcaattttggctaggatttagcttatatctaatagatttactaatagtacctgagattgcttggtagggaatatagtcttataattatccctctttcgctgaagtatctgtttagactacaattgagccaatagatacgataatatagctgtaggatctaggctaagacggtgaatatttggtattattgccattaatattcctaccggccgctctactttattcttaacggcagtgatacgatgagttggggaggtgttcgaaaagagtaaaactaataggatcatataactgatatagtatttattagagatttggtcttgcctatctggcgatacttttgtttctatagctttaccgggattttggctaattaattgatacctagaagttataacctagccggtacagatgctatacgtactacctacttatactgtgggtatattgaagctaaagtctaatatgatgtacggtagctgtcctagacttactgcgcaggactagtaatattaaatagagatcaagtattctataataactggaacggcgctatgagttttctagtatactataatgcgaccgcagtcactattatcaatctttgaggctaggctatttatatcgctctcggtattaataggataaggattatactagtaggaagtagaattagaggtagtagacggtaaagccttattataagaatggctatatccgtaccaggtcgactccgaattagaaggtatagcgtatatatttaaagcacgactatgctgatattgattcactgtgattatttttaccaccttaccaccttaccacctttaccaccttcaccaccttcactatcgctaagtcctgaataggaaccactcttaggtatagattggcttctatctcatatacactgaacctagaattttaatattaaaatgtgtcccagagtctagttagagaaataggtggtcttgaaatggagtatcggcctgatctagtaagattaatcctagataaatattgcgaggtattttattaatgagttattaacttaagtatcatttgaaaaatacgagaatttagctgtcctaggtatgagcttcgctcttttttccagggaatctaccacttattgcgagggaagagtagtcgaacctacagtatgcctatagagataacggaggataaagtagtgtataataaagaccctaattaaagcaacactacctctaaaaacgctgctaagtataagtactgtgccctgctttgaaagccttgccgatagattactactatagagtactatattatgccatttataatctgaggtttttgtggctgatattggtctagaaatcgacgaattagtttaagaggtagccgccgttcctgttaacgtccttaataaggtttagcttctatcgttaggagtcagagataagtgatacctagtcgtcctagtgatacaactagcagcgtcagactactctgtgctagaagctccgtcgcttttagacatcctgctctatccggtttctctgatcttagaagcttcagtatgtatttagctagttgaatgatatagggactctacgaaaggtcccgacgagtccttagagtgcggtatttctaaactagcctatatttgagaggtacaattgaatgtaaacggcgaaaaggtagctcttatggttacgttctgaagtaagtcggtagttttattctttaaattcttaatcggaaagagactatggttattagacccggtactagtatatgatcctcttatggtaccgcttatagaatcttttttggtaattactctattgtacttgggttccgtcataggcttattactagggacgctaactggagaactggagtgtaatagtaaatcacaatataatggtcgatttaaggccgataaagggaattgctttaagactagtataatgtaaagccttgatcccttattatatagtgcctggcttatctgtaaaccaatagtttgagtatacgttggctttagtgaagctaacgtcggctataagttaatcattatcagctatggtgtttaaaggtaatatatcgtctctgaaggttgggaaagtatgagaaaaacctggaaagaggtatatatgatatatacgactgctaagcgatagctatgactttctatggcaagctgctttatagactgattatatattgatcaagtataggaagactagactgtgctaataagataaggtggactgttcaatatattaggtctctagcaatcgccgatataattctaagtttcgaaggctagggattgtggcaatataaaaggtatatagactattataagagttagttatgtctggtgctggccttagaaaatgtcaattctgtatgttaatacctagctgtatatttttattcgctagactataatataagtcgtagtagtaaatatcgtttaaagttcctataaatggtgactatcgttaaagtaatagattggacgattaagctatcgcagttgtccgatataaataagtatatctaccggctaaggtaaactactagttctattatagcaaattagtggacaatagcgcctcccctaagccgtgtcaagtaagagcaactccgtaagcgtcgcaataatctactacaatgccacaatgaattttagcttctgtatgggatgaaaagctggcttattatagaactacctgatggtcagatttttatatactactcctatctagatacccctctgcccttaagggaagatatggtaagacaaagattaatatgagtattcagtgatttggtgctgattagtgaaagaaaacacggcctaagcccactattattcgaacgccttgcaactatatttctgcgacctctgcttagttagttggtagagatatcccggtcttctgtgccccagttcgtcaaacctagaaatgggaagctctggcgaatcatttgaataataatcgttgtatggtctcgtagtaatataaaccgtttcgtgtttagttagttcaccttggtgcacagtaggatccgtggcgcacgtcaagaaataccgatctcaatacggtggttaaagtaatggaacctgttcaatataaaagccggactatgacatttcactatatacaacagggagaatcgagaccaatgtcaccattttatttctttgattgtttcttaaactctaagtctagtcacgctaggcctaatgtagttagtcgaatataatctggtcatcgcccttttcctattcgacagcccgaattggtttaggccagaagtagattggaatgggtctggccaatacttggcgacgacctaaagaggacagtaggaaggctagttaggagcggataagtaaatttcagttggttgtagtacttgtcttgtttcctacggccatattgagagcagatcataattctagtaaacttgagaagtttcagtattgagaggctctattcggtatatgtaaaggcctaacctatctatgggctgtgatcggctggttatggccaccgattgatattgacctcaacttgcgctcttcttattgagtctgccaaccaggggatcgagcgagggataatggctcatcttctacgccacattgtaaccgtcaccctgtgtccagttccccgatgctatctccgcctaacgtgtatccggcgatgtcggtggagtcgaccgtgtttcgcgcttggattaagagaaactgtaacatgacataagtactgtaaacggaacgcttcaaaaggggttataatacttactgattgggtcactagaaaggcgatggcttcgccttacgctgtgagtgggtagcgagccaggtgtctgtgttgcagagaattgttagcgcaagtctttgtgatatcgtaatatatgggcagtgtgtactaccggctctggtgggaatatgattgcctttaatggcctggaagcctggtggattattagcatatctcggactcggacgtcgaaagaaagagtcataccactggaatggtaaccagtaggacgcccagaatgaagaccccgagtgcgattatctgtaatattttttagaaacgctatatgtatcgcgaaggggaatgagggaaagagttcgatgttatatacctgacttttgtaggtagtcttgcaatataaattgtggttttggggatatatataacatgagggagagagttaccgacccctgttgaagtcacaatctaaactcgttggcccgtagcaatttgatgctatcgcctactcagaaatatgaggaatttttgaattcattctacccacttaaacggtaccccaaccttagtcaaccaggttctcacatttagcaatgatatatatttaggggaattcagcagcttatatgttacgtatcgcttcattagtttagattattatttataaaaccactaaagggctaaaatttataaattaatcacctctatggtcccgaaagttttgctatatgagggtatgtttgttaccgaatttgataaccggcgtgcttactaattagctaaccacttcggataggggcgatggaaagtataatctcgctacccggattttcggctcgctactttctattttgcgcttaatactagatcctgcagtttatatagcgataactcgaaacctatgccttctgcttcctttagcgttagcttctatcggagtctctcgcagccggatagacttacctagaggccttaagagttgcacaaattctttcgtctcttagaagtctataaaggaaaagttaaggacgaatgttttcagttgacctggagcacgttgacaggatggcgtcgcgtgattagtagcattcgctacgcagctgtataccgcattccatacgatcggaaaatattccttaagatggttcgcgcggccatcaaattttcgaaatgtatcgctagcttcgaaagctctaaaagactttatcgcatttaaaagttcgtgaagatatcgctttcagggttcgactagctgatagcccagctaaaacacaatgcccgcttataaatttctttgggtgaagcctaccgcgatcatttagcctggcggttggttttgcttctggaagctgttaggagagtgcttcagagcattgaagacggcttcgtctctaaagtgaaatagtttttacacgcggagttcaaaagtacttaggggtcgtccgcgtatcctacctataacgccaagcgtatggcgaactgcaccgtctcgtaaaaagagtagggatataaagaatgaattctgaaattgctcctatactttcaagttccgtgaaaatgcttaagccatagatctaattctgtctaggtgttaggtcactccgtccactttcattccgaacccaccttatccgcttgtctttagttatctgtcttgacaggagttaaagcaacacaaagctctggaagtgttaaagctatcgaagcgaagactgcctaacaggagagaccttccactgctgcttccactcctgttctgtactggtttcctcggctcgcgatttgttaagagctactcttaatgaaacgatagctcgaatcaagcgcgggtccccagaagggctgtttgcccggttgaaatgatactgtaaagccagactttgagttgcgtctattgtggtgctgataagttggtggaagctctcaaaatacttgcaataaaagtcgttcttaagtccctgttgacggtgctgctgtatcctttcggtcttcaattcggccattgacatttcgggttgtgttttggatttcctcagttgtggccgggtggtttccaaggccatggtagatccgctcgctatagagatttggtggtctagtaaatttatcttaggaagagatggcttgatttgtagggtagttggtatggtagtaatagggatagtatctttggctgtgtctgtggatcgactgtagatgcttgaagtgttgtcgcgagagtaaccgggagttcgatgttggaaagggtttatatcggtcatggactgtctacgtctcggctctctgaaaccgatgtatatagggaacgggagttactagcgttttaagaatggaaagtctatttcatggacaacgcagtcaatttgtgctctaagattgtttctaaacggcttccctcacattctcaccaccgttgacgaactgcgcactcttagccgtagaccagtaccagtatagtactaagctagtctgtaggaattttaccaatgttcctaggcgctaagtgtattgctatactaaggggtggtattatagagacgttatatggttctttgatagcgagcgaacttttgtcttcgccctgccacctactcgcgcttttagatttcaactaacgagggcgaccataatacgtatctacgggttataaggtatagatagattatatcctgcagttcgaattcagactcctatctagaataattgtatgattctaattgttgctattattactagagtaaacctagtctccgtgcgtcttgtatttcatcggggtgacccgtcgagacctaattacattttgtattctacttattaaccggcttaaacgttaaactatagttttacccagcttataaccgccgccgtttctaccctaaagcaggctctaggaagtgaactagtcgctttgacctgcgatagtagtaataggatctctgcggcggctattcttgatctcgatgatctgtgcgaccgaactaggcgtaaaccttttgcttattgaggaattcctacgctgatttagggaaaccactaatcctttcgcgaaaggtattattggcaatttcaattgtgaccatttcgttaaggctggtgacccaaaaattaatacgcttcctaaagtatctataaaaccggtaaatgtcgactagatctatgcttcctaaattaagatcctgaccagacttaaatctggcaccagggaactcgataagtacctgctacaagatctcggtaggatttggtcttgaataaagaacagatccccgataatgaaatgaagccttaccctggatgggagttttatccaacttaaagaaaaatattaccaacgcgagaatggtccttataagctcagctggaactgtaaaatctatatccaacattgcttctagcgagtatatattatctaatctagggagcgtcctatcgattacctggtctagtcggaaaatattaggtgttaatagatagggtaggtaattcagagcttctaaaaacccttgctttctatctatagatagagagtatattatggcctagaacagttggggaagaggcccctcctagattcgacctagtatacccgttggacgactggggggagatatggagaagcctgttccgatagagaggagaaggtcgtgtcgtttcgccataggccagataatgctcgactctcgcaaagtaataccgagtagggtgttcgtatagaccctactgtcttacagataaaggcctggcaactcttttagttagaagtagctagaaaatgtcagtatattgaaatgtcttatggtgcttggacttatatgggcgctgcaccactgtatatcgatctgttaaaagctaactgttagtaaggttgactaccactatccaaatcaactggctgcaaatggtcacttacgcgttaagtaaggaagggtcttgtcggttgttatatagagttagaaactcgtaggcggtattggtagaacgtggacttattcctcggtaattggctagtatgtaggctttactattagatatacagcttactataatggcgatccggcaacctgtaggattagcggtagcgatatcgaatatacaacaagataggttaacggctgcttttaaaatcttcgatagaccttcggaattataaaaactatctgtggtcaagttgaacgctaaggtaaactaccggatatagtgaggaattggggtttcagacgaataacaaaaaatgttacgcgctaggtacaggaacgcatcgaaatattgtatgaccgaagattgattgagaaaaatgtcaattgccgttaatacacctagaggaggtttcttagtatattaaccacaataaaagactcggctactcggtatatgtacctatactggttccaatacacaggtctggtaaagatgcgatcagaatgccaatacgactttctaaagcctgtagaaggcccagttggattagaccgcgcactctactaccatctaaagtgagaatcacagggggcttcgttagaggcagttagcgaacggtgatatccgacctctcttcgcagatgggacattgagtaacctcgaaatggtactccctaagacaacttggctttccgaagatcacgatataagtgtcatatattgcatgtttatacgggagtatatgctctaggggtcgactcagacagactaaataagtagtggtagagcgaagcctaccctaccggcgatataagcgatataacgtctcttttcgaatggctgccgatatctttactgtgcttaattgtataaagtagtgtacgaagtaggatgaaacgctagcaatatggtatttgaactcattgtcctaaatacttaggtatcgcttcttataaagtacagcgaataccacggtaggcgagaatcctggacaggttagcttcttaattaggttcaggagagtataagttaagaaatatggttataccatacatttgagggggataggcgtctattaagaaggccgaggctataaggttatcaaagtcctcctttaagtagctaatggatgtttacgtaacctcttgaaggtaattgtctattgatttgttttttatatagtcccttcgggctcttactaaaagattaaatggtactgtatgtaggagccttttgtggctttgtacgctagtgctctagaaagcgcttagatgagacgctgagaagcgtcgataattagaaattcgctcggtctggactatattgagttacttaacgattaatgtttacagtggctggaaaacgacactatctgaaagcccgtgacgtggatgtaggtctagaatcgtgactgtcctagtattgagcttttggagctgagtgtattcctgtgcgaaggcttctattatatgttgactgttggttaagacgatgactacctgtaggggagcgggaataaccttattactaattgtaagctgtcgacgtggtctctgtaataagtttattgcggcttggatgttagggatagaatcgaggaataaatataggatctaggtctatggtaaaatgagttacctcttgacctcttgctgtagccttgtaggggtcaacatcccgtctgtgccccctagtgagaaggtttgatgctttgtcgttgaattctttagctacttggaatcctctaacctttattcgagatatagaccgcttttagtaaataatataggattctgtgtatgggtggtcttggtgctgagatagagatggattaagcctacggggcctttctgtgtaatgttgttataggggaatagagcccgcaaggctttattgcagtttgaatttccgtaaaagtagagtagggatggatattgatattttggattgggtaattcctatactagttgttttaggcggttggtattaactaaatcctaagctttattctctttgacaaggtcaagctaggcagctattagagagattgagagattgagagattaagagattggtaaaagaatgggcctattgggaaccttatatacaggctcttatctaaaagggacaggcagtggcttaatagtggtcgacgcttaggttgaagttggcataatcttgtcttgccttaaaatcccctctgaactaaaaatatgtcaagtaccagaccagtgtattcgtagatgacgctcgcttaaactaattatgcagcaactttcacggtttatcagacggcattcttttttgatatcggaaactagaccacataagtctcaccgtaagataaaaatgtgtcttcccctatactaggacccctagacctagttagagcacgtatcatagtggcctttcatatggactatttaaagagctggtacggttctttgttgatttgcctccttacggtaaccttaaaactttttggttatggccttcggtgtggacaattatataagcacgctagcgaaaacgggattggaaaagactctacttcgcgaaattaaccctgtgcttgttctgtcttactcagctgcggatgtagccccagtgctgtgtagagttaaccagatataccacgccgatgaaacttcctatatcagaatgcttagagaagaagtagaaatggatatacattttagtatcagttggcgcggctaactgggcattgctggccggctatctagttattcccggtacattcacttcgctacagaccttaaactaggttgaaaagacattgtaagccaacgaggccggttatatagttctatatatgatccagaaccccctgttactcgctattgtgtgcttactttttgctagtggaattgcggctcttatgtggctgatgtatttcctaaatcttagggggaactacccctggctaattaacaaagtttttttgtaagtgaacaagtcctaactgaaagaggtatgaaaagccagatctaactctaatcctggactagacccctatgcctatatgctgctactgggctgctgactactgttatcaatgtttgtatatcttaaggtggggattggtcggtgatggctattataataactgctgttactagagtaactcttctgagctgtttagcacttcttgcgctttataagttctataagctagagcgaatcagaaaagaagatgaggatattcgacgttctcgagtatccaccactcttaataggtgatattagagttttcagaccggagaagagcctggttagaagtatcaccgttatatcgagactggtatttcccatcttttcctttttgattctacccctcattctggtactgcggaagcctttttgcttctagagtttagttgtgagctcttataaggggcctaaatgtggatcttggcgcgcgcccgatagtgctctcgtctatccctgtctcacagtatcacttcttgttcagttttccgatttccatccaatattcatcatgtatacctattatctaatgaaattggtcctagcccagaaaaatagcatgttcaattgtaaaagagattttcgtacggaagccctcggtggtcagtagattgaagatcgcctaaatggcgctctaaatcgatagaatggttagactgattgctgataggccgatagatagcatgcttttatttaaattgatacttctcattctgccaaatatacttcatctttccaaataaaagaaattgaacgattaccctgtagatagtaaatatatactgtttgtttatgtacatcgaaagaacctttcctttggtttttgctggcatgttgattgttaaatcctactcttatttcctgcgagtctatctcatcttctagtaaaaatcatcaaattttggaaatggctatctttcccacctgatgttggatgttgttagcaaacaagcttatagacagggtaagtttcgagaaatttaatatctcaagttttggtctatcgatttcccagatcaatatgctgtgattccccgaaatgtcaaagaaactgtttaacatgacagccatagggagctacgtatgcatatgacatacggtgatagaagttgtgctaatagaccgagcccttaagtcatgctgttaattgagggtaataagatttagttcaattagctatgttgagaaaggttggctagtcaaacctgttacgtaaccatttatactattacgtatgatccggataccgttgaagctatttattaagtaacgttgatattttgggtagttggtgatcctagtgccagtatgatttatttaaaggctaaggtataagtgaaatatgagagagtataaatattaggctaaccgcctttatgagcccccctttctactaaaatacctgagtcctatccttagacagataacctaaaacgcgctactcttaggaattagcctgttttgctagtatatacggtaggaagcccctactccgcaaaccctattccctggtaatatctctaatagactgagctagatatagctaggagttaagtatcttccgatagtgggattaaatctaacctaggctaaatgatatgtctactaaagtcctaacgactactgtgatgccggaaacagtgccttatgtataaaaccagtacgtagattaactaatattaccgacattgctatatttataggttaatattttcaagtactgagagttttttatgtgatataattacgagctaccctactgttgacctatgtgtcggagacgaaatggcgtctacttaaagtatgaagataacctaaacgccctcttggaataacgccgccttacccttagctttgataattctaatattcacgctgccaactgggagtatggtagaggctattataacagcttatattcctacccctatacgaatcgggcctactataccggttgaagggtctggaaatgtggtatggttatcgaccactcgatggctgactttatgctatctactcctcctagttgttaaaataattgatgaacgtcgatttatttaatttgcttaatatcctccatggaggagtagaatagggctagcttacgatatctgtctctatctaggaataactttatcccctgttatccttttctgtagtaagactgaggcaaaaaggaaaataaaatgttggatattcaaggggaacagtatctgaacatattggaagtaggcctattaaaatagactgaaaattataggctattttatgatactgagtaactgtacctcaactttctatattttaattgacggtaatagaaatcccaattaatagaggtttactgtaacctactataattgcggtaatttactactatacttaaagatctaatgtcgttatattgttactaatagactgacattgcgaagacgaaggttatgtgttaaaataagatcttagagctataaatggttctttgacccttgtccatccttgctatattttttcacgccgcgaagctaatatagcattataaatcgcgctaagactaaatacagccgaccttctaccgtgtggcttaataagtcggccttctgtaataagcagctgagtctaaacttaacggcgtctctgtatatcctaccccctacaattcagaaaacggctaccgcggtaatcatacctagttcaataaagccacacctaggtcgcctaaacgcaagcattctataagtgaattaaaacctataggatacttttgaacctgatactggattatcctaagatcggtctctgatatttacccgaaataagtcggaaaaagggaagttggtatatatctaataacttgaaaaacagttctctcccgctatatatttcctagagctgatggaacaagtcggctatctaagcttcctaaaattgctcgaatgttactattataatgctttatgtatattgatttaggaactaacggaagtgtcagttagccatattctagcctctagctgctcgattactaccgataaactcgttggaattattaagccggtaagccaataaaatctcttataggtacattcgaaattaacttggaataggtattagaaggaatctaatatctacgtgggctcaggcgagcactcgctaccctaggcccggaaataatcctacttacgcagtctggtgatattaagattagtgaggtatccgcagatattgcgaaaattgataaaaactgacttttaatagtaggcgtcgagaatagctgcgaaattaaagaatcggaaataaatcctgtgacaatgaaattatgcgctctagccgatattatcacgaaattgatgttgaaaaatcgtatatacgagtaggaagcggagatttagaacttaccttactagctggaaagtatctctgtcgaagaaatcttgcaggtaagtttatgctgtcttatcatattctcggctaatatgatagaacgagatgtttacccgagatttatacgaggaagagttgaaattgttagtcagtgtagctaacaagactgcctatcacagtatcaaatcttactatgctcgttactgaaggacaaacttattagcttttgctcggctgttttttgaggcctaccaaatcgagaaggaacccgcgatcctattttctatctgtgctgttcggacaatatattattggtgtataaggaaagctaggtacggtagattggtagatggagcatggttccgacggtggtagtttgcaaacgctctttaagcgaacaaatatagtaggttcaggatagccccgactacacttaatttgcgacctgttattataatcagttcttacttatatgacccatcggtattatcaatttatttgtatatttttgcattcgtttatcgcctacttaactagggtctatgtaacacaaggagtgcgttgcttctgtttggatttgagacataatcatacccgctgggcaaaatactatcattatctcgcagatgtgctccccgctggaactataatactgaaaccaggtttgtaatcaacaaagagaggtgaatattattagactggaattttccacttcacagacgatctggattgagctagatgggtctgaacgctcccgtctatatatctcagcgatgcaggacccattgctcatcaggatctttatacaagtttagctaccctggcagccatacgaacaaggcatcgagttggcattttcagtggtggaattagcctcgccggtgtcggctgtatcggtgatgggaattgggccaaatgtaggatttccggtgcataccggttcgccttcttgcggtcgatatttgctgtcgccattatattcaacaatacttccaggccaagggaagtgaatgtctacattttctctggtaatacagccattcacactgcctcccatcaagatttccgggtccttttacagggcatcccccttcgtaggacttgataactttccattccgaattctttatcggctcgcgatcactagtgaggctcacctggcaggacctactgccataggtggcactgcccagaagcttgatggaattattgctcctagtccgataagtcgcctcttcagtcagaacgataaagtcacctagggatatcttataaggaaagtcactaccatctatagcaagtagcgagttgttaagtgtctttctactagatccgtaggattcgggagaggtcattctcaggtacatataggtcagcgaaaatacaactgcctgtaaaagtagacactatatcatccgaattctttgtcggctcacgatcactggtgaggctcacctggcaggacccaccgccatgggtggcgctgcctagaagcttgatggaattattgctcccagtccgataagtcgcctcttcagtcggaacgataaagttacctggggatatcttgtaaggaaagtcactaccatctgcagcaagtggcgagttgtcaagtgtctttctactagatccgtagggttcgggagaggtcattctcaggtgcgcataggtcggcgaaaatgcaactgcctacaaaagtagacactatgtcacgagtattatagtaaaaggggagatggcctcctgtgatcaaataccggttagttatcatatagctgaaggttatactaggtttcgctgccgcttatatatctccgaagtatatataaatgcaaggacgcttgaactattaaggctgctgcggttatataagtctatcacaaaaccatagtgtagcctagttatactgttcttttagcttaaagtgcgctgtagtaggtagaaatttggctttcaagacaagactaatatgattctaccgattaaccggaataagtggtgagcctataattgtgataaaatgtccttatatctgaatagaaaatagagttccccgtttaagtaagtcgggtcgacttactactccttatacaatctggcacgaatttaacgatagacttaactaaccaacattccctataaagactaatactgctaatattctgtccctatattgaatttcccctattataaaagtacggcgctcgctatggaccactatttatgtcttaagtcactacaaataaactcgaatcctagaattacccgcttaattcctccttgattttatcctcctacttcttgtccgctctcagttagagttagcaaagaatctcaatatggatgttcaacctaaacttaaaactaaaccagccgatgtagcgaatcaaaaagcatgtaggagaagaaagtctctttttaaaaaggcctctgagtatagctcggaatacgatgccgatatctaccttattcttcggatgaagaaatctaggaagatcttcgttctggtcttaaatataaaagattggcctctttcctaatattaattagtaagttctctgtattatcgatctcattgttagaaaggtactaaattgatttctagaagtactattatcctatacctattcaaatgtctctaagcgacctagagtctaagctatgaatctctatcttctatactagtaataagtattaccctcaattaggtacccttatagggttatcctgattgttcagctaagccctttacagcttatatcccttataaagtcattcccccctatcacttatatataggattaacctccgagggcttccgttgtatcctatgaattataatatctgcgctacgccccgaagattggtcagagtcgattaaccttattatttatgtctattataaatgctgcggaaatgtattataaacttagttgattacgttaaaggatataaagatttacttccactaaagggactaacgatgaatttattatccgaaatgtaaattctttaggaattagaggtaaataaaactctattacagtttaagatttgcactcgcctagttagataataattgccttgctttatgctaagccttcccttagcttctatgattattctaagtataaattttaatatagggcctggttacttaattaggtttacctctagtggcctaaaaccgaaaggcatcttggtaaatattgttggataacgaatttgcgtctagatagtacgagacttgtttgatgatatatcccttatatactctattactgatctgtatatgtatttcctattctattctatcctatgagtggcctatcgcgccgaccgacattaacgacattcgcttaataagcgaagaatagcatcctcttaggcatgatatcaatcataccgtctaaaaagtcttagaatcaagcgccttagtaaggatatcgctacctactaaccagtaaggttatatggaattatgcctatctaggataaaggtataagatccctgtactgctattaatgagccgaaataaacgagtagtactcccttatggaatgcttagacattaaactttggcgagaattgcgataggctcaattctagtgtaggcagggtttctgaggagctacccggaagggtgtttaagtggccctctgatagtattaccgaagaataaatgtctctagggggtatcatattcttactcgatgtctcgcctagcgttttatcgtatctatagatgctgcttagttgtaacgaacgtggtatatcggtttgggttgctctagattgcaagcttatatctggtgcgataactggttataaagaggccatgctaaaaatattcttatcgtttgatcgacggctgtcctcgggtctatactagtagatataggggttcgtacttgttagtaaccagagacggttgagtatagagaattctaacttcagcttgacgctgtataccactgtcttaaagcttacttgaatgtagtgtagcttatactccgcgaggagtagtaagacgtttaggattataacgaggatattgatataaaatagatggataatagcgttgcggccgtcgcgaccgcggattataatggtactcttgaaatgatataccgctttatatatatatatataccacagataacgaagtcttatatacaaaaaactgtcgattagatccagtcaaatatcgcggtaggacgagtaaagcatatatcgctgcggttgaggccgaagaaaaaaacggttattggtatatataggatacaagcgtttgtaatgatcatctatagaacccactgtacctttcttatgtcggagaaaatgaggtgtagacgcgagtagaggacgatagcttagccggtaactatggtgtaccatcctattataaaggggatggacgtcgggaggttagacgcctgagaaataaagcgagctatagtaggaatggtatatacgagaattccctaggatgcaaattgtatactctagaaatagaggccctggtagcgcttaaatgagtcgaacgtgataatcgctgtttctagggcattgtacgcgccgatagagaatatagatacgatctagatgatagagatgttctctatgagaatggccccaatatttggtagtaggctggttatgagtgtatctatggtctaataaggcttaacaggtataaagagggctagaagtatagaggataaacgattaacagcttggtttataaaagcctctcaaaccgaaaactgcccttgcaataagatcatgacatcgtagctagggggctccttagaagctctaaaaatgtctagactcttatcggcttagggggaatatgcttggttggattgctagtggtctgaatgggtctaacgggtaagttagctatatcgaaactagagtaatttgtagttgagactgaggtatacaattgatttttaatctatgccacagttatttttgacgtgaaggaaagctttcccactattcctaagttatagggctagtttcacgacgactgcaaaaccgagggcgggatcgtcggcctatggctaatcgccttatcttgaatcttgataaatgatttccgatgaaccatggaaacgctggttcggggagaaaatgggattatctgtggataaataggatttagtttcgatgttatcggaaaccttactaataaactttctgctctacctgctttctaggtcggccgtggttgaagttgtccctacagtcataggagaatctagaagaatcgggtatgcttaccacgggcgtagtcttttgaaatattatgaggtagcactactgtattcaaaatattctcgatctctagagtctgaggacgggtagaatgagccggatgctggaaaaggagtgggaccgcagatggtcggcccacaccgctgactctttgccatttccgtcagccaatcggtttctcggctttttaggcaaaacctaaaaaaatatgcttatgtaatcccagctgatccgttcaaatccgttgaatgtttataagctgtctgctagggttataagaactggcgatcgaatctgagtagatagaaagcgcagatttcagttttaaagggagtatacttattagggaagctagtataggagaagatatataccttcttgaatatccttcaaaggacgagactaacgagaaccaacaggtcggcactcgacgaggactaagttattttcttgtgagagcaggtaggagaacccgaccatggattgctttcagcgtaccattcttttgctgggtacctgcgtgatattccaaatacctcaactgccgtacctgtgagggtggtcccttcagcaggaccaagcaataaaggtatgttgcataattactggcctgtcgagactaggcttgtggatcgtgtctggacttttttgaaaaactttgctatttcttctctcgactataaatagaacctgcttgatctattgtcccgtgggtcatcgacgagttttctatcacaggaccgtaccagcgtcggtccatattcacacgcggtgtttgattggccctacaagtgcttcctttcagctaatgagccttgatagctgaaatgcctcaaatggttgccctggaaactaagcccaggttcctgttatggctttttcgacacgatctaaagtctcatagtcagttatggaaccatggtgagctttgaggaatgtagcacgagtggcaacggttggtgcaacttggatcccaaatcctagttctataaaacaaagccctatacatgtccttagttgatttctggattgttttcttctctgaatgaaatggatgtctttatggcctaactttcggaaactgttgtaatagtgggaccgtgtaaatagtggaagttacatctaggacaatagtacaactacaccacatatggctgaggccagagagcccttcttgtttctaagagcggctcggatggttcggctctggtcgatactgaggcacaaccgtatacctcaacatagatcccggtgcgcggcggtcgatcactttctctacaataaaaccgcagatcttgtgcttttgcgctagcgtaccgtggggcccctgtgtgtcaatgggtacttgactttcaggcttatgatgctgataccgatacagctgcttggcaggggggaggtcacgcgtttaccttgtttcagggcttttgattgtctccccctaaacttttaaagtcgagactccctgaaggccactgcgatcaatcatttcttcgctttgcctagtgtctttctaaacctgcaatcactcaccagacggaaggattcagtatggcaaaggaccaaaagccttcccggcgcggtgtagaccgcggtattgctacaatgaagctcggtactggtaggtcatgtgcctcttcgctatgttctgctcggtcgactgtctctaggtctaaggcggtaggcaagctgtacaaagggctggtaggtcaatctctgtttcccatttcctcgctcgagccttgttgtaaccttgtgctttatcttatcagtaccttaatgagccatcttgctgacgttagcttttagggacattctatagcgaaacgcgcccgaaagaaaaatgatgaagtaacctatcaaaagtgtttagctatgatggacgaggtataagaggagtgccagttagcccttgaagagatagataaagagagagcctatgactcccagtcgatgtagcgtctgtatgctgaaaaggcctaggagatatcgaaactgtaggaggctatcacagtaaaaggtaaagccttagctgagaaccagaggcttgaaagagagctctgtcaattgtagtaggcgaaggagttattgtacgccacaatgtagggcctggtcttatggcacgatattcagcctgtcttgtattaaatatatggcgagctggtatcggcgactactcggttctggaatacgatcgatgccctttagaaccataggttggtatcttacttgcctagctccggagggatccatggaaattggcctgagtaggatgggccgcttggcactctaggtcacaatgccctacctgggttttccgcttcgagtgattatccgcttgtaacttaagaggcgccagttctaatcaactaatattaatcacttgtgtgaaatatggtaaattcagcgtttccggcggtcctggctttactatggaggaaccggctagtcggtttatatagccactacgtaggtagatagctcatgagattatctttagtaataccacagccattctatcataatagtaaaaatgaaaaataaatggttgttgtccgatgttctgctgtggaaagaatattgatgtaaatactttgacgattagactcgctccgccaagcgtagcttagaaggtagagagaatgttctatggtcgctgaatgtggttagcggtagggcctacagcctggggagatgatgcgctgatctgtcggaagcaaccgaatctgactgatcatgaccgtggtccctacccagtatttgataggcaatatgactcggcgacattcatgaagaaatttggctgtttccttggtgcttggttcacatatgcttttcttgccacttggtagataataggattttaaacgatagcctacgacgctggcacgaactatagtatttttctggtccgcccacagtggccgaaactcaattgagtaggctacccgtgggtcatgagatttggaatactctactaagcgtacgacagctaatctatatctcaaattgatctactactgaatgtggacgtgagggtccagtgggctagggagagggtagtcgataaaatgatacctaggcgcttgagaaaccttaatggtatgaatcagtttataactgttactggcgaggccagagaattcgtcctaaggaattcagtttattataccggaattatagtaaatatttgtctactttctgtagccttacggttagttatagcttctagtctgccctagtgagatatgattggtcgcgaagtacaatgcgatggtgataccttagctaataaggctgataacaggctctccgatatattctacaactatattatatttcgatctagatcactgctgcgaccgaagggttcgcctagttgtattatcctctgtagtactgttcttcccctctttagctattatctctatagctgtctctacgactgccaaccgactgcggatgtcctccaagtcactgcgaatagttgtaatccagctgttagagttatccaatgctttttgtatgagcctgggaaaagtcagcctttgttcgttctctgatgtattgtataactaacttcgttcggatatctaggctgattgttgtaagtagatgtattacaaaatattattataggggggtaaattcgcactcactctgcggtacattgtaaggcgattatattgcagtcctccgcgagattagcctatccgggttgttctagttcttcttctggtcgcgggcctatactctaggtgtatggaggactttcctggccatcctctactacgatgtcgttgtggtggttgccaaagaagccattctcctgtaaagaagactcttcctcagtggtattaccttccgctgaccctggcggactctagatattctcggacccggaggatgacagggatagtgcacgttgtaatcggctccgaaagctttgtcgttgattagtgaacggaatctttcgaatccttcctatagttggatctgtgttaaggtaagataatgagttctcctagctagatgttataggagaagttgtataagctgatatgaagagttagttctctaaaccggaacttataatcggggtgtgctaggccactatgttatatccgtacttacagcaaatttcgcttggtttggaatacattcagctaattagtcacgatttttattaaactttaggggaatgaactttgtaggaaggcaagttttgcctctaaagtctgtttgaggttacattattcagtacccggtggggcttggtctgggaactcattgctgtgttcttttgatgtacagtaattgtatttaagaataatttctaggagtatgaaattgacagttaggcgttcttatagctagggattgttttaatacagatggcttgggggagcctgaaatacgaagtcaataattcggaattcagacttactgaaccgattccctagaatgatctatgggttatgttattgagactttagaagaatttttgtgaaccaggggtactatcttaactttttacttggatctggagaggatttatgctcacttttcccctctattaggagcttaagtcgtgctattgtccgaaaaggtcgttctggttactgttagttcatgcgatatgtccccttgaagcgaggtggcctgggtggaatgggaggaaaagaaccttctctcctggctggacgcttatcgggcgctgccgtggaaagcccgctcctatgtatattctgaacaatattagatggaccgaagcgctgagtctctgcgaggaaaaaagtactatattctgcgtaagcaacgtcgtattagtgcagaccgcttgagtatccaggctatctaagccatctaagccgagcaggagcttatcgctcggccggccataaggctttattagcgaatcttataagcagaaggcctgcgcaaagtaatattgaaaaatggtttcaaacaatcctaactactgagactagctagatcgatagtattgaattaataaagaggaaaggttcgagactaggtacgaactaatgtttactaccctttgaccataagctaattatatatcacaggccgcgcgataccattactctgccctttacggtgtgaagaaacacgatcgtcgacgtagatttggaactatgtatattgtgtctgtgtagctaggaagctgagataccgatgagcggaatatccacgctactagcagttcgttggtatctgcgctatatcgcgatctcgaagtagtaatagtaaatatctcgatgaattagtgctgttggatgttgctacgaacggggaaaatggcaaatatggcagctgagcaatcaagctactgtatgattgttgtatgtacgaatacacatattatcaaaatataaataagcaccattccttggaattacgataatagcgagggagtaccaaggttatagtttgataaaagttagttccctagagatcgtagaatatggccgggattgtcgatcgatcgccgaacctggaaaataaagttcgataagccatggaaatgctccctcggtgagaggatgcgggaggatgcggctgtcccgaatgatccttatggaaagcttatctaaacagcctctgctatacttgctttgtagattgctagcctaaaaaaaaagagatccggagcaggaccaacaaattcttatgctgctcatatataggatattaggaaaggaatattttattagaagatactgcattcagcgtcattctcgagatgggtagggtgcttggaatacaggttaggtgccgcaggtgggccggcccacagaacccactcctgggagccactcggttttcgggtttagttcaaaaaccggagatatttacgtaagctcatgtgatccactggcattctttctagttataagccatctgctagagttactagactggcgatagaattgagtatatggagaggaattgtctggctcgaagagagtatagtataatcattaggggaaaacttggtgtaggagaagatacatagcttctagaacgttctacagaccagataggcaaagttctgcttcccacttgataggggtacttactttctaatgactgcgaccaagagaacataaaagaatacaaccacgggtcgggttgtagcctaccattctgtcgctaaagtctgtgtgttcttccaaatacttacctgccccagcagtacttcctaggcaataatcccccgtaccatcggacactgatggccgaaagctttgggcttgtggatcgtgtctggatctctgcaattcgttccagtttctctgcgggcgataaatagaacctccctgaatctactgtcctgtgggtcgtcgctgagatctgcatcgcagaaccctacctgcgtctgtctaaattcacgcgtggtgtttgattggccggtcgggtgcttttcgcctccagggtctcatcagtgtaatagtagcgttgcaatcttgcgaggggtggcgatcacgagaacctagttcgtgggcttggttgcatcagttcacatggttgtcctggaaactagacccagtttcttgtctgagcttttcaaaggtctagaccctttttggctattatgccaaagaaagacaatctttatcctgagtttgaaagtatgccagtgcctatgcgcccagggagtagacattttagtaaaggcaatacaagttaactgcgattagaaaggaaagaaataacattcagcggcgcgagcctagagatggtagtattgattctagtgagaccgaaaggtcctccggccaaccgcaggtacagcacagcgtttccgtggctatctccagcccattatttcggcatctgtcgaagcacttcaatccttatgaaagagacggtgactgtggttaaaacggggagatatagaatgcaagcgcgttgagcgatttaattgcaaattcggtgatgggtacgaatcttactttcgcggtattactttctcctcaacagtcgatgaaagtgggccatcagacctaacgcacaattttgagaggaataccaggtcgagacttggctctgtaggccacaaagtctccaaacacccctttaacgtcgttgaaatcgcttcaacgcttattaacgagaccgtgactctcgctaccaactgcgcgannnnnnnnnnnnnnnnnnnnnnnnnnnnnnnnnnnnnnnnnnnnnnnnnnnnnnnnnnnnnnnnnnnnnnnnnnnnnnnnnnnnnnnnnnnnnnnnnnnnnnnnnnnnnnnnnnnnnnnnnnnnnnnnnnnnnnnnnnnnnnnnnnnnnnnnnnnnnnnnnnnnnnnnnnnnnnnnnnnnnnnnnnnnnnnnnnnnnnnnnnnnnnnnnnnnnnnnnnnnnnnnnnnnnnnnnnnnnnnnnnnnnnnnnnnnnnnnnnnnnnnnnnnnnnnnnnnnnnnnnnnnnnnnnnnnnnnnnnnnnnnnnnnnnnnnnnnnnnnnnnnnnnnnnnnnnnnnnnnnnnnnnnnnnnnnnnnnnnnnnatctgcgacaaaaagtccctctagcccgtgcaggcacctcttcgtggtgctagggaccagtattagagtattcaagagtacccgaagaagcaaagacctgcgcaacatcttcatcgtctgttcattgttccgaagggtcatcattggatacatagaaggagccctagttagatcttcgtcgattcaacagccaaaatcataaactaacaaattgaagcgtcttcagtatcaaatgacgtatttcacatttttttcccttggtagcttgtgatccaataacttcctcgctacaatagaaattggcatctttcattcagatgtaggcaaacagagatgagtgttgtctaggaacgcttgttgcgttgaaccgttagcgttgatgtgagtgttgatgtgagtgttgatggtgagtgttgatgtgtgtggtgattgagcgcagaaagcgaggtgacggtaggatgacccgtcaacccgttgaagcttggccaaacgttgtcaacgctcaatttgagtgatgaccaccaaacttcgaagataaattgtgtttttttttttttttgttctattttgctcttcgttactatccgaactacccattctgcaatgctgtttgccgggtttctgaggcttccaacgaaagtggaagaggcgtctagttgagatatctctcacgccaatgggcgttcatatctggccctcaacatcgtcaggcttgatcagttttcccggccaactcgttgacattcctcctctcaaatacactaccaagcgcccgctgaaaataaaagcaaattctattcagaagctgactgcgttgattgactgatgtggggatcgtaaaactcagtctatagccgcctgcgcctacatattctataagagataccaaggctagttggaaacagtactgtccagatccttgagtttctcctgtggacaaaatggactccccaaacagctcgccagaccaggaaaagcaaggaaaacagcagcccaatgaattgccaatccataatgataaggaccataaactggaatcttcagatcatgtccctccattggtaagtaaaatccgtcagcttcgaattctttggctgaccatcgtagccctccccttcgcaacacgaagaagcaacaagacataccttggcgaccgagccgtttcaacccacgttgaaggtgctagcagacctcgaacgcaacgatcccaagtttgcctttccagctgctcgacttgttggactctaccgacgcctatgggagtcatgcgtttccaagcacatcgatgtccaaaagattgaccagagcaatgggatcttgaaggagggacggaaagctggagactgagcattttttattcctctcttatgaggacaaactaggggaatttataaccacatgctacagtaagttatcgaatgcgttgaatgtatcaacagcgtgcaccgttggcacccgtcaccaacacaacgaaagttcaccggcagtataagccttatctctccttagggaagacagaaatagatagcggaaaaacaagtgtcattattcccccccatagacgctctaccacatggacactttaccaaggctcaggctcatcgacagggtaggcttgaagatcgctcgctttaaaggctgaaacaacatcattacaaagagcctgaaccgctcgcttgcgctccgacaatactgaagcttgtatattgcagagctgtagaaggatatcgctatcgcttgctaacaagtcatttgacgcttgaagctgtcgctgctcctcctcgagtcgtattttctgggccgatttgacgacgtagcattcctataagtaaaagtacaagtcgagcaatttgagggctggtgtagcgagggagtcattgaggcttactacttttatgaactccgctataagggtacctcgtgttctcactggaacctattcagtattagtgggttttttttatttccttcctagagggggattgacctaccttaggtttaatagttgtgccgtttgaagcttattgtggttggttttccaacttgggtttatcttctggagcgtgagatactcggcactgtctcttggctggccgattaatgggggaaggcgaagtgggatggtccattttggtgaattggatcagaaattatgctcgaggggcatttatagctgataattcatgtgaggctactgttatttctactagtgcttccttacctagggtcgactgcaattttaaagctagtgaacagttagcttaaccgctgacgctcgatctcaccacctgctgagagcaaactgcttaggaataagcgggattaaatcgcatctatagtattgacacaaactaatacaaagtctatcttataatggtagtctataagtgtacttccgatgtatggatgctataaattactttcaaatcattgaagctttgctgtgactacaaactattcgaagtgcggaagtaaagataatttgattcccaatcttgatgttaataggcgctgggaacagctatctcgcaccacatcactagagctacctgaaatagatgtcgctagcccttacaaacgattaaatattctcctcggagaccgttttaacaattttttagtcgtgttgttgttataaattctgctctggatggccctctggatgcgatagtcctttactagatctagggatctcctcaaactgaagtgtatcagtctgggattggccacaagtgcatcaataatcgagaaatgtccacccctgaccgctaacatcaatggatcctcgaaccattgattccttaggttgatatcaattcggctatggcgtagtatttcccggactatctctaggtcaccgccacgggcagtaatgcagagagcagtgtcataggttgcgacagtgcttttattaacatttagacgtgcgccttgctgtactaagagccttaccacatcgagatgactatgtgaaaccgctcgataaatgggcggatctattaaaccccttctattgatctctacgccctctatactcagtaaacaagcaactgtcttcacgtgtccgtgatatacagcaacggaaattggagagtggcctgcaatgcagagattcagagcaatccctggcactgtaagcagccgttgtagaagtatagtatctaatcttattgcggtatggtgtaaagatgtagacggggactcaagtctcccacggcctctaacgaaattaatgtcgatgtctttctccgccaagagcctttcggttatctcgtcgtatgacgagtaagtagatagccaaagtggtgtattactatctttgtctttgcagttcacgttggcaagggggtggcccaggatcaaattgactatttctaagcgtttggtttgaacggcgagatggggtggcgtatagccattccggttctggatgttcgaattcaggcccttttgcctgagaagtcttttgacagcctctactgacctataggccactgcttggtgaataggtagctcagcctcttgtgatgatttggtactaagaaacactttggtcatcggatcgtttgaaaaaatcatttctatcacgggtctattgaaacgacatgcccaagaccacgccgactggcctgaatcatcttccaagttagggtcgctgctacttaaaagtagcagttgcacgaatcctattcttcctgcgaagactgctaggtgaagcgccgttcgcccgtatttgtgtttaatgtccacactggcggcgcggtgctctagcacgctcttgacgatggagaaacccccgtagtggatagcatatgacagggggctgtcgcgcgcttgattttggatgttgatatctagatctcgatggctgagcagcagttcacgcacagcagcggaagtgtatttcaacgcccgcatcaaaggagttttgcctcggtaaaatgcattgatgttggcgttatgccggagcaaagcctccccaagaccaacgttgtcgtatttgacggccaggtgcagcaggttgctgttctgaaatttgatattgtatctccagatgctgggctgcagtttaaaatcgaagtctttgcatgatttttcgagggtaaataatgcactgccgtccaaatgtgacacaatccacaacaaaagctcgttgggcagctctgtaaggttttgctgcaatgtattagctcatcggtaaaatcagcaagaaatcaaaacagaccatgaccggataggattggagctaggaagcaaatgaaatgtaaatgtggctgaggtctgaaagttggacgccttagatatctccctcagctaaattctgtggtcagctagaagtgtagcccgtcactccgctgaggcgcgtagcaaccacacggcagcatcaaagccttgacaagaatgtttgggcggcgttgaaggatctctggcgtctagctcccgggaacgccaaatcagttcctggttatgccgatagcctggagaccgaatctaccttggtacccacttctcacatctagcgccataagagtaaatcatagcacataacgcgcatcaaagttccataggcaacccagaatttcacccagcatttgtcgactttgcggctaaccgcagtagatagtctgttcgccaatacatggccatcgcgatggacagtcacaagtgcagctgattgcagcagtggtctggaatgatatcccttctcgcaggccactgattggccgtatagtggcgcatactgcgtgcgaatgcattctcggacgtaccgactgtttcaaggaagtgttccatgccagccacgtagccatataggtaaggagccacggcgatggcatataaagctggcgagggaacgctgcaagatagtccaacaccaattcccatccgaagcattttctgcctttgtccaccacctcaatgtccgccatgctgccttggaattcgcttcttgtttgtgagatggaagtcagccccaatggtggtcctggcttctgttgcaggatgacgaaaaaaaggggctccaaccaaaaactcggtcaaacgtgaagacaccaagataggccataaaaagctgaacactgtggccagagagctgtttgacctgtcaaacttgcaatcgaagctctgtgcttttgtcaaagaatctctctgtgcaaggtggcataggcaacgacaggccgatggggttggccagcagtggtatgaagcagctgtccgcaaccaggcgcgagtgtcacatgactctagagttgcatctccatccattgtgcatccgagccagcgtcagacatcgccagcctccaggcgacgccctgcatcagacaacactgaccggtcaccacctcacgggctcacacaagacccgccggggcccgtctcaaccagctccgagctggtgcaatcaatcaatcccgctgtcactgccgaaatgctgcggaccaacggtgttccatggcacgtttcgccagctcgaccagctatcctgacgtctgtcactaatatctgggcgggtgtccaagacttgacgctccagagtctcagcttgagtgaagagctcgaaaaagatccactgtgtgttttgtttggccgaggacgaggaacaagcaaacgaatgcgtgatcctgtgttgcgatcagtgccgagcgcatgcccatccatcctgcgtggaagagtggttggaaaagcgacgtacaagctttggcacgtcatgctgtgtgtggtaagtatagatggtttcaattccgtaatgctgggatgctgatgaatgctgtcgaaacgaaggaactctagacgcattgattcgtccactccgagtcctcttggcagataccgaaacaaactctgtccactcggcaagcgaatcatcaaccgatagcgagcctgtcagcgtcaggagtccagcacgaaacgacccgagtcagagtcaatcgcgtcgggggtcagtggaatccctaggggtatcaatcgagcagagtgggccccgtcgctcagccagactagcaggggctcacctaccgcgagattcttctacctctgcattgcttcgccggtcggcacgactgaattccaatcagcgtaggtgattacaatctacagaaaacgcgccacggaaatgggaaattagcgaagcagctgtcaatcacacgcgactccatatcctggtgatatggagttttggagcaagcttagcaaccaaataaattaaattccgaacttcaaaccccacggcacactacgagatcatttcatatttgcaagtgctagatgtcaatgtaccttataatgttattcgaagtctgcttcatttcaaatatgttttagctcgaaacagagtgcccgtatatactgtaaatcatcttacataccataccctagaccctagtcactctctagaaacataagcaaaacattaccgaccaagcggtcattagccggacattgactctaatatctatccaaggcatgaatggctccctttcacgatgtcttatctttgactggacttagaggatcgaagccagcatgcgaacgagagccgacaagcaccattatgatgataagtcctgtcgagatggacaagggatatggacctggctcttctagaattggtattgacaacagcccttggctgttaggactatttcacaagaccttactcattcaaactcaaagattattcctgagagcccatttggctgctttgtcataatgaggattccatgaagtaccctgcttcgcttaatcagttgataccatcaacacaatcagccagagataaagataaattataaaacaaatcaaggggaaaagccatcttatgcccaccaagccctagctatttgggacccattctcataaataatcccgttttgttgagaaagttggacttcatcaggcatagcatcgatagcgttcacaggaagtcggtctccgtccccgggattgggtctttgcctgatcgtacctgacatatttcagagggtagtccattgaagaccttccgaggatgttgcattcctaaactatgcccttccttttcagaaacgacgcgtctgggtgcccgtcgtctgtcaaggtgcgccgcttgcctttggttcgcttcaatcatttctgatagcaaaccattctgcttggccaacaccaaagtacactgctcatcagagatatttctcggcgtagaaaaagcagtaactctaggtaatgtcctactgagtcatgcaatcgaagaatgggaacccggtgtcaacatacaatgcagagactcccaaagccatgcctatgatcttttctaacagttgtagccgttgaatcaagattcgcaactctatgtcttcgaacatatcaacgtcatcaccatccagttcgtgcagggagtggttggaggagtgactggtccactctttgaagccaatctgaaatcttgcacaggcatcttggccacccaaattgtcatccgaataggatgctggacttcaagatcaagcttgcaaagaccgcccaggtcaaatgttgatgcaaaattccctagtgcattttcaacgaaaaacaattgtcgacaaagctctttcaaagcctcatttgtacgcccagtagctttcatgtcttccaaaagcgcaagaacgctgcgctgcgcagcttttgcggcctgcgcagtggaggttccggtacctgatggttcggccattgtgagcgaagaactagagcaagattagttgacgcctctcaaccggaaaaatcaagggtgggctcattctagtacaaaaggatagtgcctattcttggtgtagattattgatggcctgggaatgatgaggataatgtttgaaggaggattcaaatatatatactgtctggagtaacatcacttatctcagggcttgttagatggttcgggttcctgggaacctgggtgattatgaccgaatgattggcctaaacaacatagcttgcacgcatctggaattactctgctgggctcttaggggtaaagcattaaagtcttactggttattcgtgtccttttcgtaataatctgttcagcgcaaaagaaagatgattgctcatataagccttttgatgcatgcgcttattggcgagagaagcggttctttgccgccatatcctaacgatctttctctagtactccctattccaggacgtatcgtaaatttcttagtggactcatccaatttccctagtaccggtagtcatccgaggcctgattagcaaagtattcccaggagcaattatcatagaatggtaatgctgattgcggtaaaaagccctcaaagccgaaccaagtatggagtacatgagctaacagaaaaaaacaaaagctgctaaatatagacgccaagcctgcgaaatataccgagcagatgcataccacacgttactgcacttgtatagatggacgtctgaagatctaggccaacatagaataccattgaacttactaactgcgctattacagctctcctaagtaaaataacctgaaataactgtccgagctcttcaattgatcttgtatcgttctgttagtgctagcagttgctgtattaaagctacggagttgaccgatgcatcggagtgggtccggggattcgggagatcgacaagacaacaaaccaaaccacaaccttacgcatgcggagtacaggatccaaaaggatccatttacggtcatattattcgtcggctgtgagaaccttgtaactactatcctgctgcctagagcgtgacctaaaaattagaatcagaggcgccccctgaacgccccttttcgcggttcaaaccccggttgggttcatcacacaggtgacttccttgacttactccctctctcctacctattaccatactctgactgatccatcgaagaacacgatcaccatttcaaaatgcatcgcctccgtgactccctgctgagcccttcgccaaaaggcttccccgtcatcggcgaggcagacaccgtctcccatagtcagcaggatgtgcggcaaagtctcgctcggggtgaatttagggaggttcggggagcagccttcttcagccgaacatggatcgtcaccgacaggtactgcaatgttaaggatggggtggattccctcgaaggctacgttcgtgagatatggtatatgtactaccatctcagcctacatacgtcgcatgaaactccagaacacgatagcctggtcctcgatatcctacgaatccagggaaagggaccgttaaccagacctgtgaaaggaaattacggaatcgatatcgcacgactgaccgaaggcacgctatggaatgacctgccgttcttggttaccgacatgactgacttatggatcaacaactgcggaccaatgtcgggcacccagcgcctgaactttgcctctttcttggcaaagttagcgtcaacccgcgtctgcaaggacagaatgtgccaggtcgcccttgtcctcttccgctgtgcatttgaggagagacaagagcttcgcaccagcgaggatcaggataatgaagatcctggccggagcatgggatccctcgagcttatgcacttattgccatctgtccaggcatggttcgtcgaggcaaggtacaattttttgcaactctcagaggtctcatggaatgattgccccagcacgattggccagggtggcccctgtttcatcgagtctgatttcgggaagcgttgttcaccgactgggttcacaccatggagatggatgtactggctcaagcgactccacgagattcaggatgcggcaaaggacgctggtgagaaacgtctcaagcagtgcgccgtcgaggccatttccagaatgctcatggatgtgaaggaacgaaactctgacatcttgagggttttcaaagatgctggggatctcatatacgaagataaacatttggtatctcttaaaaggattgtggagggcgaaggcccctttttcccggagaacgaagatggcgaggagagcgaaaagacagaggggaaggaaaagctagaggaaagcaaaatgccagaggggaacaaaaaggacaactgagtctccctctctcccgctttatttctcgggtttcatagtcctcggacacaatttgctcgcctctacccctattacttatgaaatccagcgccaagtcccctcggggtttcatattaaaagcaaaagaacagacaattacacttccataattatccatcaaagcacgcatgtttaggaaattgcatttagcattggactgtgcctataatcaaagctattgtacctatgatgaaaccttatcagcgatagatgtataacgggtgtactaaggaattaaattgcgggattttggcaggtataaggaataacgaagtggctgtgtgaaacattttgagaaccccagttaatccttaccgcataacagggaatcggcccccagcattacccagaccctgatttggcagtccggctcgcaaacaagtttgaccccgcacagaagcaagagtagcgctgctgcagcagtttgatagttatccctctagcctatttctgcttacaatgtacatgtgtcgtatcatagtactccatttcacttccgactacgatcaaaagatgctggatatattcgataatctacaaccatttcgttgatgagcaacaatatctagctagatatcaaacgagtgtctttatgaaataagaaacaaaattcgccgaaaattgaagctggatagatactgggtgtatatgtatcacccaccgagcagtccttggttcgagtccttgtgggtgtagggtagtaagcttcgagaatcacagggcatctcgcatatcaccaacaagaagggaaccaaaaaccattaaatgccctggtgatcgcagagaccatctagtcacaatcgacagcgttgttgtaggtgtcgacggtacatttgttattatccttggtgcactggaaaaaagagcgagattagcacgaaatcgattcagatggctacttccgaatgattgatattctaccttcttgttatcaaacttggggcacttgataaaagtgtcctttccagcatcgttcttgtatttacattcgttcttagatttggtgcatttctgagttgtggtcccgaaccgttagtcgcgattcccaagtgagtacttaaggtatgggatattgatgtttactcactccggtgtatttggccaggacaccggcctcagccctggcatcgaggtcgtttgatacagactcaatgggggtggctaccccgcccattgcagcgaagagaaaaagggcaactgtggtgatttgcattatgaagggcttgagatgatgatcctctggagaaggttaaagtggttgaagatatcgaaatgctgtgatttgagtgatactatatggaattgagggtcatgaagccgcctttataaaccagatcatgagctctgtgtgaaaggtgacacatacaatgctcaggtccaatgcagtcatcttgggggtggcagcttatggattgcatgacttctccaatgacattaatgcctcacatacttcaggatactggacctcttggctggtatattcttacgggtggggtctctccaaaatcccttacctgcttcagcctccggggtaagatgcactacttgtttaccaggaagatatttttgggcttacctagtggtaatcatttcctaaaaagcagagaaaacggctgacacgttgacacggtgactgggccactcggatctgcaaaggacgatggctgcattgcatttgataaagttgtttcactaggaaatgatctccaaatccaaaatgttggtatatgagaaggtttagcatatggcggatgcttataggtcgaaaaggcaaaggcactatactatgtatgtatctatgtgatactgtgatacagccaagctgtaaggcagctcccggttgtgttacgtagggctggggtagattcgagccaaagcaaattaggaaatgattcgcgggtagtatttcagtaacataagctcacatggtctaggcggtcaaaagttgcatacttcaaggtgggatgggtgggcttacagcgggatgctagcccttgaacaggggttgtcctcagtggcagccccgcttctccttttgtgtaacaaagtacatagtccgatcatactgccaaggttcgctcggccgaaagagcagacagtaagcgctggaagagtaaatccaaatcttttaagatatacaggccttcctacggttgagcttaaaacatgaagtatgaggggagtggaaaaggtactttcagtcagagaagagtattgttagtggtaaagaaatttattagctttcagatagagtagctaactgatttaatatcgcactgatgaatgaacactacggtcattctcgaaatcggcttgaccattacggagtacacaccactgaacaacccttttctggccccatcgccaaggccttagtgcagatcaattattgagcaggaccgcattaaattgggggtgcagcaaaatgtgctttgcatgctaccataaaatgctacgtacattacgcacttcgtacgaaaagctctctgaattccattgacccaacgtttgatccttgcaattacgactaggggagagatgtaacatgccttgtactgggagatccgccacatatcatccgctctctgtttcaatcgcacgataggcacgcctttctttactggacaattgcacccgttatcaagcagtgctagatcttccttcacctctcctagaccacgctaccattttcaatcaggaccaaaaaagtacaaaatacaatttcttaaatactttccacatgatctccgatgtagagcttcatatcacaacaaagcaaagcgggcttattagtttcatatatagctatttttacatgtatcgatattatgcccaatttgtctacacccgccacacctatgctgccgccctcctggaaaggtagtaaaaaagatggtcgcacatttcaatctcgtgttctcttcgcaggcctgctgactagagaaaacctctctcgcgctctgaagcctgctgattgggaagtcctgagtaggtatgacgcgcttcacgataacacgtctcttgacggagtgcctcagatcgggggtcagcgctgaaaggtctctgtaattaaccgcccagaaccattgataccgcgtgatgttaagttttcggcggcgttttccattttctgtgggttgttgttgaaatggcgattttccaccttgctagcgccgacgaagcccaccgccaggaaccgcgaattctcgcgcatttttcgcgatattggtttcgattgtttagaagggattcgagtgctttgaggatccgatccttgatttctctattgactttaggcatttttggcggagttgttggcactaaatgaagctttctttcacatggggtgtcccatttgggtgtcgggccctcgcatagcgagggcccataatttttgtaatttttgtgaggcccggttattacgcaagtactatgatccgcagaacctgagcgtttgggtgagcagccaacgtagagatgttcatggtcaggtgaatttcactgatgccgggacccactagaattccgtcgcagcatattgatgatgctagcactttcttcatcgtgggtcatagctgccggtccactaagctgtcgccgagttatcgctaacaagtgacgtagcatcgcctttatagtggggactaatttaaaaaggacaatgctgggtcaacgtggaaaaatattttgactacggatatctccgcggcattttagcaatgtatgttcaagccgttcctagagagcagagtttttctctcgggtttgttgctcaatgctatgcataatttctaccagtttctgtgcgtcgtctcgagtccgttccatcagctcattctgttcgctgatccattgcagtcgttccttccagaaatcccaccgctccttcgagaacgatgagtctcctttccatagattcaaatcgggctttttgtttgcttcagcaagggtgaggtccttctttcctacgaacttgaaaataatggaccctgcaatctcaaaaaaaggaaccatagcatgaacatcagtctataggccgaagtcagtatctcaagcacagtgatcatattcttttgcgacccacattcagcataaggatgtaattcgtagccacgcggccatctacaaggtgatagcgctgtaagagcgacggcgagggcggcggaagtggcaccggcccgtgtttccacggctcctgttctaatgcaaagacggggattcgcaatgctatgcttagttcgcgtgaaccagggccatgcggtggatatgcggaaagataatgcgcgcaaaaagcgctgctactgtgaaaagtgtaccacccttcaaaagggtagataccgtatcgcatttcccagtaacctgtaatcagaatattagcccctacattaaatcaacataaacgaccctctggaaggaatcttgggcgaaagccttgtgtccaaaatattggagagaatcaaagaatgggatggccattttgcatgatattttaggggaagaagaagtcacgcacggtcatgagtctcttcccaaatgtccttgaatacggccaagttcctccagtcttccagccgatcctggaagcgtgacgtgcgaacctgttcttcggttctatcaaggtctggaagagctcttattgcctctaccagcttcaaaatagcgggttgatagttcggcatctcaatagcagcatcccaaagtagccatgaaacgcgctcccctttatccacagcttgactctggcgctcttgaatcaggtcatcttcgttacgaagtgacatgaagcgatgagcagcgtcatctactggaactgcattggcagtgccgtaacgctcaacaaattcctgcaatatttgaatctcatcccaggttgggggatctgggtcgccatcctctgggtctggatagaagaagggtttccattcggctttgtactcttccattgttgtgatggaagttgtggtgatttgatctggggtcgccccagtcggttctgacaacgaaggcgtactttcaagtgaaagtgcttaggaacagatcgctttttcggggcagtatggtcatacaagagacaagcaaaggaggcttcgctggtggtcagacctctggaatcctaagttgctccacaatggatgctcttagcacccatatagtgtcttatgtatgtatcagcgaaaaatgctggccaagaagcgctatagccaaagtagttaggggtggattcgaaaagagatttgaagagtatattcgatttcgaaatcattttgcgatgtcattattcgcattcgaaatttctattcgaaaagttatgcggaagtctgccaagaaattggttacgtaaatgattggttaacgccagcaaatccacccgtgatttagcgtcgtcttgtcgcgcacgttgtgtataccaaatcctccttacatatggatctcgtaatttgagactcgagcctgtggatcttctcactatcgttgatagcagtatttattttccgcctacaatagataacacctcatcttaccttccgaggtactctgcaacgggtacatggtaaggccgctgaaataacgtgacaatggctgagtcagattatctttggtcttacaccaatactcccttctctctataggcggtgtgtcttgtcctttcgtacgatgtatgaagttagctggccagttacagtatttgcggataatgtttcattcagcatgactcaacaacagataatggaatcacccttagaattagttaaggcaagcacaggtcaggacaagtctcccaggagcaagatatctcctagaaataagaaccgtgggtcctgattgcgagtttcaaccttcaacactctcttttggccctgattcaataccacctgctattcttgaaacttggattgtccttcaaaagcccccagatgacatttgatctattttctacttcatttccacatccggcggaaaaaggccgtttccaaagacggcatttcttcaagcacaagttgaaaatccgtatcccgcatcaggatttccaaattccacagtacatagtctcccaccaactttttgatgtctcccatgccctcagtctcctcagaatcaatcttctcaaaaacaaatttgaatagaattacaatatccccagttcgttcctcacaaagggcgaagtttgctagcagccccagaaggcggttgagtgatagatagcatagcgcagtccaccccgttctgaaagcgaagcgatacatttcagcatggcaaagaaatatatctgcataatgtatttagggtcggtgctcgattcgtcgttggctcggtaagtgggattcacctgaccaatccttcgtgtaggtcggcacaaacaatagggaacttttctggatgaaaaaagttccaggtaagtctggcaggatcccatcgtctcacggattccgtcaatgattgtatgccgatgccgtcgtagatcggagagggggcggagtaatcaccagtatatacaaactcgcagcaacggccaaagactacctcgtcaatgtcctcgactataggaggtcgaagaatctcgcttggaaggagctatctaactccttatgaattaagaatcgctttcggtccttgccaacaacgaacaagacaataccagattccatgaggctatgtgaacaccagtagtaagaaccggtacaatgtgagagatgaggactgttaatgtacctatgatactcaagaaccattttggtagaagaagacgaggagtccgtttcaccagcctggggatgaaaattgtatctttgagggtcgtcggaagggagctgaagtagaaattgaaggatagaattgcttactaaatatagggggctttatttcttgagcgagcgcttctgaagggagaggagagatgaaaccatccattgtggcaagtggtgcatttatattaaacttaccaagtgctagctagcctaggcgaggaaagaaagtgatacgatacgcatggacggctgcggtactgaggagtcaagatggagatggactgcagcactaagcctgacatggattggtgctataacatcttgctcaaccccctcagcagcaagcaggtagttcagttctctccttgccgcagcacatcctctgatgcttcagtacatttgaatcattttaccaaaaccataaccaatgatgtcatctggataatcgaagtccacacactgaaataaaaatgagatccagttctctcttctccgcagaacatcgcagaactgcgctaggattcgaaatgagcatatgtggctagatcttcctcctgctgttgctgctacagctacttcggtacatttgaaaccggtcctatgaaagctaatcaggccacctagttatttgaattcaaggatctaatatattctatgcataacaaactagtataacgagtcattgcttagaacctgcgcgccatagaggtccggtcacagttgagtgagaatcattagcatggcgctgaaagtgcatgacttctgcaatttttttatcgcatacattgcaagcaataacagtgcttgatccaaggttctgtagatgctttcgcttgatatgcttcgaaacatctccatgcgatgagaatagttgcacacgcttcttgagggctaggttttgctgtcccacacaaataaagcaaaacaagggtcgattgtcctttgtgacagatcgaatagcattttcgagtgggcttgccgatttagtctggacctcagtcgtttcgctttccggcttctgatcatcgacgtaaccgctctcggccacatgactttcaacccttttgttctgtggcaaacgacatgtgataccttcctcaaattgacagtaagcggcaacagcatcaatagcttcagtgcgtcgacaccgaatgctggatgaggacgaccatgaataggaggacaaaatagtgctagtagttgttgtagttcagaggtatgaattgtattttattctagagggaaagatgaggttatatatacaacacggacttacaatgaacttggttgtctgtatagacatttcggagctaattccgatggtgcggcttgcttcctgatctgcactagcctcatgtcacgacagtagtatagaaatgtattctgatcctttgttttgattgccgctatggaccgcgaggctaaacgtaagattcaaagttgtatagtctacggtatccagcaggggaatctctggatcgtataggatatcgtaccatcaacaattgtaggaattaacaaggtggttgtttttatatgtgcttcaggggcggactttgatgactaatcagtcctgaggtcactacctgcaaacagtgcaaaatagtgtttgtttaacgtgtcatttccccgcgctggacaggatttccatccagcgtccagagctctgttttgttgcccatgacagtgatggacaaggcataccttccgcaatggggccagttacccgtcgagcagtatttgattgtgagtgttttgcgccactgttgtttcccctgcgtggctaatatctataaagaaacactgggatcactcctcatctgagcctactggagaccagcgcctccgactgatccgtcagttcttagatctagatgagattccgaaggaagtgcaccctaattgtcatgcctcagacacttacgaagcactgtcacatttccctacggcctatggaattgatactatccttcgcccctggcgctctgatgacctacggaagatagcgtggaggatttgggggtgtgataacgatcagttgattttattgcgcacctactataatgccgatgacaacgaacaaatcacggaattagtagggtctgatgagctccacgaggagaatgtagcctggtgggcacttcttgataatcccgaactcttcaattttggtgaccagtggtggcgagtcttcgatatcttgccagagttagccggccctttgaatggttatagccgcctgccagacccagaaagtatctcacgggagagacaggattttaaggagagactaccgaccctcaaacaaagcgacgaatggacggcgaatcgtgataattatattgaaagagagtttgcataccttcggcgaatagcttcagagggctatcttgctattgcagatcaggaagcttttgaaacagatatgctacggttaatctattatgatgggaagaggaatattgtccaagagacccggacagaattcgatgagcagacatttgctgatgttgccgttgaatgggaccagttgtcgcttcctatgcaattatgggaggacggaaagactggtgagaagtatcgagtgaatggggagctgggaagggagttatatcagctagatgaggctgatctggaataagcatggccatgtcgaatctggtggaatcgtggcacatgatatcgttcgtttgctcgttggcgtcatgtatttaggcgccgcctcttcaacagagggactcttcatcatctttatcgtcaattcaatcgtttatcgtcgttccaactgcttaaacatgtgagcgttactagcgccaatatgatagcaggttggaatcaacgtacagattctcccggaccccggctaggatgcgtattgacgggtcataatacatctggtaaatgcgtgcataagaaccaaccgggtacaccacaacacttttgacagccctcatgatgcagcttcctgtatgcccgaggtgattcttgggtagtgagctctcattggcttgcctgtgccccgatcttacccaagataaccaatgtcaaattgtaggctaagaatgagaagactttgcgtctccttccccttgcaggtggacttgtgctaacagcctgattgtctgcagaggtacgctcatctgccaggaagcaagacaaaacatcagcattcctgcgcctttttccacttctggaaagacatcaaatgtcatccgcagacaacgaggatcacgcattcgataccagcagcctacgccacttgaaggtatttgaaaggttgcatgcttagccacaggtatgattcgggtagtggtataggctgatcggagttcaggagttgtatcatgtagacaaatcgaacaatgacctgatacacagaatctagggagaaagaggccgaggtacgcgatacgaatattctggtgactcatcgtcgatagtagtcatgtggaagggacagagagcatgcgacagtatttgtataggggagctcgagcagacaagacatttgttcgcgtggcattcgacttgagtgatagaaatgagggtgtcctgttatacgatccgagtcagcaaggattgatctagttggacgagttgtcgtagcgtacctgttcatggaaatccccaagtacgctcgagacgggacaatcagtttgcgcaatgattatatcggcttcacaactagatcacttacaactttctgcaatgcagttaccagccatgccacgtcgtattcaagctcatcgtaatctgcactcgcttcaaaaaagccgcgttggggtgcacaagacaatttgttgagacagtaaacgcgcgttacgaacccacttgcgataaacattgcacttccatggtggatgaatgtgtcgcgatgccagaggtccagggactccatagctgtatgaaggtggtgggacgagggcggaagacgcgatgaagcacgctcgtcggccgctaccttggtcttatcttcgatctggcggaataggccactcgcacagtatattttaccgtcgatgatggggtggccctataatagcgtgaagatgtcagcggtgttcgtggttagaggaataatgcttggcgcggatggtcagacacagcgcagctgtaggcgttagatctcacttaccttagcatggaaatgggagtctcaaggttctatgcaacgaagttcgcacatggatggccgcaccctgttgttgactcgctatcttggtttgcgatcttctacctaggacatgctgcattgttcgaagcgacggggctaggaatagtgtgtaagccatggctttgcgtggagctctggggagctcccaaaggttcactgtcaattattagccagtagaccagcgtggaattccataactcacattttctgatggtcaagaccagggatgaagagtggcccttgctctggtgcattgtgttcgaacgtctacggatctggctgtcccgcgtctttcgggtcagtgcagtttcaaggatctgtgggcccatatacctacagtgtgagcagttgcacttcaaatatgtggtcaaccagagccgcgacagtagaccggctcgctatagcagagacctctttatagataccttgactagctaatccaaatcttgtatctccgatcggctggcgtaaatggggcagtgaatctgcttggaaccacgtcccttaaagtacaggaactgtctggtttgctggtctacggtgtatactataaatgtcagtacggtataaattccagtactcgatcaaaggggagaacttattgagtgcgtcagatataagcctgctcgactttgtagaatcaagtggataaataggagagcaattgcaggggtagaggacgtatttataggcttctcggcttctgttactcaccgacctggttggaagtgttgaaggacacatttcctaattgaggcctgttgaaacccgcgtcttcttttaccacaactatttgcagcgacatttttgatgccttcagatgcctagcgagagacgagtaagagtggtgctgagagaaaggggtgctgactcggtcaagcaatgttggctgactgttgaatccttcacgttcctcttaaattgaggctttgtgggagatatctaatccgtaatgacaggtatgtattcacatatttcttgtcctagtcacctcatatgtttggcgactcaacgttggatcactgaaaactcctacaattctgtccctagggatcatggaccttgtttctggcctcgcttgagtgttgtgttggtttgtgttgagctgtgggtctgtccgcctgcctagactgcagaaagcgaggtcatatacagtaggatgtgcggttgctcaacccatcaacccgttgaagcttggccaaacgttgttaacactcaattttcgaagttgtgaacaaccttcgaagatacatttcttttcttttcttttatttttcgtttctttccgaatatcttttttggtcactctaaggtctataatgctgtttgccgagtttctgaggcttctaacgggagtggaagaggcgtctagttgaggtatctctcacgtcaatgggtgtttatatctggccctcaatatcgtcaggctcgatcagttttcccgactaacccgttgatattcctttcaaatttactacctagcgcctgttgaaaataaaagtaaattctattcagaagctgacttgactgcgttgattgactatgtggtgaccgtaaaacccagtctatagccatctgtgtctgcatagtctataagagataccaaggcttgtcggaaacagtactatctagatccttgactttttcctgtggacaaaatggactccttaaacagctcgctagaccaggaaaagcaaggagaacagtagcctaatgaattgccgatccttagtgaaaaggactataatcaagagccttcagatcatgtccctccattggtaagtgaaaccattcggctttaaatgctttggctgactatcgtagacctccccttcgtaatacgaagaagtgataagatatgccttggcgaccgagccgtttcaacctatcttgaaggtgctagcagacctcgaacgtgacgatcccaagtttttattcccagcagcccgactcgttggattctatcgacgcctatgggagtcatgcgtttctaagcacattgatctccaaaagattgagcagagtaatgagatcttgaaggaggctggtatgtacctgagaaaagagagggacggacttcagctttaccacaataagtagctagcttgactgcgcttttttgagtatgcaatggaattgtctcgggaatgactgattaacctactcgatgactggaactacccctacagtcctaatttggccgggttcacggacgtcgtaagagaagagtaaggaattgcctattttgggttgccctgtcctatattagtaacatagaaatactacaagcggcgatgcagtgtaagggaaattacaccgtatacaaagtaggttatatattcccgaggcttttaacaagaagggtaccaaatagtcattatttattatcgtggtctttactgaaatgagtatacgaataatcccgcttgatttagattaatctcactcgtaattactcgatatattatgtacaaaaaaccgtgggtttagggatagcgtcgggggaagcctagttaacagagaatgtaccgagagactcgaatacggtagggattccgtacgaggctaaggggacagccggaagatagtgcctgttgcacggacagtatgccaggtgattgtgtctagcaactgtctgcgaaaccgacgaagatttcccagggctttttcaacccgcggcaggaagaacatatcctctcctatagtcttaccagacacccgctcaaatcgcacaaaccgaaattctatccagtgtacctctttagggaaaaggagcgctgatatctggaggaaaatgtcgctagcccgggtagagttggtcagaggatctggacctgtctacctgaacccggatagactgtcgagattgggatagaaaaggtattcgatcaaggaaggctcctgagttccgtattctgcagggtcgtctttgccaaaagaatcctgccacagatcattgggatcagtagcgagacagggaggcggtgtcggtatgccagaagattcatgccagatagcccgaaggtcgagatccaaatcgtagtctgtaatgttagcgcaaactcctatcaaagaaacgggtacagaccattctcgttcaatccattcatttctgctatatgactggccgtcgaacgctgtagggagaatatagaggtgtgtaaagcagcgatttaacgtgggttggaagggatggaaagctggagacggagcagtttttattcctctctattacgcagaatgaggacaaactagggaatctataaccacatgctaagttatcgaatgcgttgaatgtatcaacagcgtgcaccgttggccccgttcaccaacccaacgaaagttcactagcagtataggccttatctatccttagggacaacgcaaatagatagcagaaaatcccataccattctccctggctcgtaaacgctctaccacatggtgtctctatcaaggcccaggctcatcgacggactaggcttgaaaatcgctcgcttccaaagctgaaacaacaccattacaaagagcctgaaccgctcgcttgcgctcccacaatactgaagcttgttcattgcagagctgtagaaggatatcgctatcgcttgctagcaagtcatttgacgtttgaagctgtctctgctcctcctcgagtcgtattttctgggccgatttgacgacgtagcattcccataggcaaactacaagtcgagcaatttgagggctggtgtagcgagggagtcattgaggtttactacttttatgaactccgccgtaagggtacctcgtgttcttactggaagctattcagtattagtggttttttttaatttcccgcccaggggggtatgactgaccttggcttcgatccaagcctggcgttgaaggcgaacatctaggtctaccagtctttccatcggtcaaagtggtatggtatttggcgggactggcctttagccgagctaggtatgacttggcttcgcgcttcgttgacgcagaattcaaaaggcttagaaagaattcctaaattaaacaagcggttagcctatgacacagaaagaaaaaaattcatgtgccacttacccgatcgagcaggttcttctttgcgcggtggccgagacgatctcggttttcgctgctgcccgagaactcggcgatttgctgggttcggacattcagcgccgggcgcgccgcaattgggtcactaggacgaactagatgttgcttcaaattcttagtcagtaaatactcagcattagtggggtatatccggtttatttaccttcaccaacgaggatttggccgttcgagaccagttcagcgttcgagagctcatgattaagcgtatattttgcgaccaatactagtgcacatgagctcgaagcagagtagttttgacgtagagatcaaactcgcatactcggtaccttgtcatccaaggagccttgaggcaaaggagtgttgcacaagatacgcagaaatttgaatgatcagtgagttccttcaacgaggctcatctcgaaaaaccataaacctattggaaactagagagattacgatgttctaaagacgtagggtcgaggatctataaatattccacatagagtgatcatcatgacctcagtctattcgcttggaatacgctttataggagtgaagattgtactgcaaggtcccacaaagctcctgtccttggagtgttccgcatcgccgtggtcaaggatggacctgacgtcaaactcttcagaaaccccggggccttgacgaaattggccctgtggatcgccgaggccattcgagtccaagagaaagagcgtggtgactcagtcaagctcggtcagaagggagcagcaggaactcctctcgtccttgctggcctcgatgaagaccgccatctctatgtagtcgtcggcactggtggcggcggcggcgtcgttgacttcgctgccatcgccaagcgccaggaggagcgcaagaagaagaaagacgtcaaggagaagaaacagaaagagcgatcagagcgccggtcccagcgagcagcagagcgtgccgaacgggaagaagagattggtgcgaagacgaagaatcagaagagtccgagtcctcatcagaatcggagtccgaggacgaggaagatccgcgtggaagcatcttctccgcaaccgatttggtattgccttccaggaggtagtccaggagacgaatgcgcgtgtgcgcatcgacagtttcgagcattgtgttgtcaaggtccagaaggatgacctcggcgggttcctcgaagcattgagtttccgcagtgtggtgggctaaatcctctacaaacacaatcacgcagtctacgacttgtctttgtttacttcgcatgggatgtaaatgatatataggatgggatactggactctgaaaccggctacatgcataatgtccgttgcatgttctacgcttgcaagcattcaaatgcccttcattcttgcatctgtctccaatggggtttatggcgttgttgaaaacatgtctgattctatccagtccatagttgcatcgaatctatgcattttcggcctttccgagagcccgcatatccacttgttaaccttcatgacttcgtctgcttttagatagaacccagactaataggaaaaacaatccaattcctcgccatatcgcggcacgattacccggtcctccgcgagaacgtcctcaccaaccccccacccgcaaagtatcacaaggcgcaagatcaagccaaccggccaggggagatattttaataatacatgtataacaccatttaattttgacacatgcgattctcacatgttctctccccccattgaaagttgacactaatcccagtcctcaatccacgcacattgtgccaccacccaataggtatatagagacacccgccttcatgaagaacaatctccacataatccgcgtccatgaacccaggctgcatttcctcccattgctcatactcagcaggagaagactcaatagcagccagatccaccttggaagtatcggacttgtcaaccagtctacgagtcgttggctgaactccagatacaggatctggatctgccgtctcatcgatagacgtgacccattcctgttttcgagggtgaatctgagattcaggcgtgcgtggcgagtacagccggatatactcaatccatgtacagatgacttcggaggcaaaataaagtaaattcatatcctcaacgccataccacttcacgctcaagtattcattgaacatccattacggaaaggcattaaaatgctgctaccaaagcagcacctgcaacaccgacaaacatccctcctgacatataagtcggcatagaagccaatcccgttgatgttgacgtcgacgccgtcggtgtcggtttcgtatacggcacaatagacgtcgggaaatcccccacagcatccggaatctccggaccatctccaatctccacaatatcgtccggccccggattcccattcaaagcagccaccccaacaaaagcattattgtaattgatggccatatacatatggtccgagaaactggtgccaattgtacctgcgaaggtatcgtcctcctcgtcttctggttgtatgaggaagacacagcgttccccgtattgggaatcccatggacggaacagatcgctccagggtgcggagatcgtggcgtctccgaaaattagagaaacggtgtggttttccgttttgcgtgagcaggggagtaatccgaactgggggtcttctccttcccatccgacgaaggagatgttgtagtctttgtacatttgtagtactatatccttggggagggtcgttgtgatgtattgggtgctcagcttgtacggcttcggactcgatatggtgtaatttgttgggacgttcgagtctgtttgtacttggaatcgagagagagggagtaacacgagtccggtggttatgttaaagccgaatgcctgtaatgggccgtgatacttggctttgttgataccaccgaaaagtatacctgcgcctccgctttcggatatgttgccccatatgctgaatgagggggatcggattagatcctgattgatgagatgataagggaatgatgtgttttccggagatagacctatcgagttccctggattgtattagttttaagtctgaagtcatagaacgaaggtatatactaacatctttcataagtgacctttataagggataatccgacatccttcacttgggtccctcctatagtgataatgtcggtgcgtatggtgtctggagaagatgaccacttatgtttacttgggatttctttcgtgctgttgctggatgattcgctgatattgtatgatccaaatgaggtgcaaaggctattctcccggcattttgagttttcgtagtttgtgtcctcggtaatgacataaaactcgggagccaggaggtctaccaacatgcctatgggctgcggtggtgtaccaattgagacattgatgaaatatgctgtctgtatagatatattaaaattcaatcctaagcaaggatactccaggacgtacctcgttcaacacattggtcgccagagtggcagtgtctcttttctgtagcggcttaggtattttagagccatagagatccatgccgatgacagcaggtacgtcgcgcacaggaaatgtgtgggcactggcactggcccagttggaccataccaatagagctgtaatgagtgactggcgcattgtagagtgctaaatgttgataccaatatttcaatattgtttcttatactccgtacagaaaaggacataataaagggcagagtcagcagacaataaaccgccccaactccaaggcgttacttggcaaggcgtttcttagcttgaaaagtactatgtatggagtactttataagacattattgccttggcatttgttaacaccaattgcgagttgtgctttagccccggtggcggaaacagttccccgtgagtggacatgccaaggcagatggaaattacagggctagccctggcccccagggagttgatataacatgactaatattttaaaagggggctgtacaaaaacacatgctaaatcttgtgtattgactagataaaacatcttctcaaaggccttgaaagaagaatatatactctttatacaggtctttattgcgtactccactgagccctcggttattgtatcctgtcactataaataggcggagaagtacttaataatgatgaaaggtccaccattgccctagctggcccttgcacatgaatcctgaatgttgtcggcgtgggccgtattgtaatgtagggtccaatcaatggtgttcaactctctgtattgctgtatcgactttcctagcaatttatatgggccgtcgattactaatctaaaattacaaaacgcataggatcaatggatcctccggtatgccggtatgccaatgcatctactccgacagattagcagtatgtctccttaaaaaccaaagctgtaccctgcgaaaaaaaatgaataaaagttcatgccaaggctcatagtcattctgatatcatcacaccaaccattcaagcctcgacttgcaaagttccttagttccaaaggcttttcgccgattgaagtgggtcaatttggtcacaagccaccctgagtctaaagaactgcatcgacaaggtgattattggctgaccgcgaaattaagtgtgtggactgacgcgggggcctgttaccccacggagaaccaaacaactgagcctcagtctgtaaatcccccctaagcagcattaaaagctctgagtaacatttccctaagggagaatcattggctactgcttcatagcgatcattcccgtccttatatgtatagtcattgttacttcgaagctaaaagctccccgacgagttcgctgcgaatcctcccgctcagatttgattaacaggagccctagtactccggcctcctatcgaagaagccgaagaaagacactatcgagaacagatttggatgaaatacccatttacagaactggggacttccccggcagcagaaaacgtggcggtactcctgacgtggaaagaggcatcacctgccagcagactagcagctctccagacctcgctgatcaaaatctcacattatcgagactggatagctcggtaagtggatccaagattaagaatgagggcgccaattccggctacacccctttaccggctaagcctttactacaccacaacactggatgacggtaaggccacttccggccttctcctcgccatgccaaagactaccctggatgcaattttggcctcatgattaactatgacagggctaatattgtatctgggtaaatttaatgctcgccatttgaaaattaactaagaatacgatgccaaaattccaggtcccttgctatttcgacccgttgtcatagctctttcaaaaattcagacgcgagggagacccacacgttcctgggatcatatccgaccccagggtccacaacatggttcccaggcacgctctttcttggtcgctccaagggatcagactcgtatttcccagaggacctaagttacagccattgccccactcaagaacccattagcctttattttcggtatcctctttcttagaacaaagggaagatagagagggaggggacaagtcaaggtagggattaaccttttgtgaggtcacctgtgcgtcaaccttggcggtggtctgttttggtctaaatgctctccgaaagatgccaaaacagggatatttcaggcttggcattccactgatgtataagtttcatggtagttcccaatgaaagtcccggtatacggcaatccactagcaacatgtacaacggggagcagtacccgcggacgtatcgggtcttttccacgaaattgaattgatcgtcatgctactcggtaggttatccaggccctctgcgcccgccagggaaggtgagcgcggagacaatatagattagatacgtgtggagcaagacaaaccgaccccgatgctattcaaacctctctagagactcaaggtgtggttccgttgctctcggcgaattccagacgatgtgtcgagccagaggacgctactgcagacaggatccggccaagtgctgtgctcccggagtccttcgatggggtaacgagtcagccaaggactggtttccttggaatacccagagagaacacttcccgccgtggcagccgcgtcgtggatgccgccaatgtccggagttgtccctccattttatgcggacaaatcaataaaatgctagaaaagtcacgtgtgcattttttaaaagaccggtaatcaatgtaatttcttgacacaccactccatgtcatcgtgtccttttcgggaagtatccaccgaagcgtatctgccccagcaagagctggtttggtgagccatccaaatagggctcgactgcaactggcatcttatttgcaccctgcaaacattgaaaagcgccggcacctatctgatcaacaaaacctcgaaccacattcacggcctacttaatcatgacctttgccgggatcttcagaggtttctcctctaatggcatttattctcgttcttatatgtgttttagctggaagctaccgacattttttggctacagcagacatcgtgacagtatgtaattgagcctcgtttacttgactatagctgctaaagatgcttccagatacacctccctagtccgcccggtggcaatatgccccagctcctttctattcacgtcatgtctatctgtcgaggaagcaagaacgatatcaccggctgttcttttctcagagttcctgttcatttcctcccgatcccggtttcggcgaatatgcaaggcgttccatcggtcaaacatgagatcgcctggcctgaatatgttatggatcggttagctacattagctcaaacgagccgactaatgtcaattttttacctcattgcgaccggtgcctcggggctatctagtagttactggataagctcttttcggcgaggaaatttgagctggcatgtacacacggctccggcgcagactcttgccagtcatcctgacatgcctccatcattggtggaatttttaagccttgtagtaagtcaaaggccttgttgctataagggaagccactctgaccttcgtttcattgcagatgagtacgttctgtatgtgctttgcgtcgactattgcatcgatcatttcggaggaatttgtatatctgatcaacactgatggcaatccttacggggtttgggctagccatggcaattctttcttaaagttgtcttgggcagccacgactctccaatttttggtagttgttgaatcgttcatcttaatcctcaaacgcagaattggttgttttctgtgcgataagactagttcttcactagtggataaatgtggcaactgatcgccctcgatttacctctagcgatttgatgacgggccgcggtatacagtccacaatagccatatgttctcaataagctgacttcttattaagctcccaagtgcgcggtgtatattactgtttgctaatgaatggcctataatttccatgggcttatctcttctacaaagttgaatccttggcctccttttcggttttgccgtggagtttgggatgttaatcatcagccctgcgttgctgatcatgagcggtcacatagttcgtctcgttctcctctactcccatactctctcgcgggttatgtgaaatttctccaggctgggaatattgaagggttgtcttggcgtcaacaagtggcccaaggaggcgtcaataccaatgctctttagcgcagtcatatttgagtcttccatgtccaatctgaatggaccaaaacaactttcacgctctgatatacggcatcatgtgttatcttgacatacgttgcctcagaaataccccaatctaatactatgaacggttctaagctttcggtatgatagaaccaacagttgaatagagatttcgattggagtccttatgttctgaactgttcactccctggtgactacgctgactggataatcgaggactatggtttcctgtttgatgctttcccatcatataccctagtacagaatgttttgcgcggcatctgtgaagagcagcaagtcattatggaatggccacccggacaagtctgcttcgtgttccattttcacaactttgcctaggctgagaacaatgagcttgtacttttactaactatagaagaggaagaatggataaggtctatactggcttgggttataacaatggaagaagttggttgatgccattccaatgttatccggaatgctattctggtcacgcggggcctacatccaacggaatgccttttcgggtcccccttcccgagcagcctccttaagaatccggcggcagtttaattgcaaagtatctactgtcattacccgacacttgcaataacagtttgcagtcgcgtgtacttcaatgtaagtctcgtttctagcaatggacgcaataagtgccatagcccggtcatacgtagtatggcgggtggcctctatataacacccgcacctagtaaaccgagggaagtcatcctgctcggaagtcctacataacggaccagaaggcccatgtaaggtaaaaggcgagcagcattttctgtggccatttaatgcaatacagagagagcttgcgattatcttcaacgtagccggaggtcgctggttagatacatccgacattggctcctccgttcgggcttcatattctcctcggctgcttccccaatctcgcgcgacggctatttagtcttccaccatgcacgtcgcgacgttgacccattagagagataaagatcagccaaaattgactgaatgaagaacccctaccggaaaggataatctttacccggatacccaaacctacatagctatacgcggaaaggatcttgaattatgttgaatgtaactttaggtagacatagcaagccgctgtatgttgttcaccgctgcttggcgacttcctagcccccacccctcggggaccagctccatacttgtgcacttggcatagaacgctcccttgtgagctcgcgctttactctctcctccttctatgctttgaaagaacccagcgggcaaggggtgggtgagcgatcagggatgtctcttcctatttggcctttccactgatcgtgcagtttctcctgcttatcccaatgctcagggatcctttgctctgcgtggctgggtgagtttaaccagatctccctgcgtcaacaagacacctcgcaggataggtccgcgtgaacaaatatcctcgcaggcaagagctgtgcaaccaaggacttcagagcttccgtgactacgactgtcgctgccacgagcccagtgacgtaagacctgcgctccctcacagccaatgaggccctgtgcatgtaaaaacgcgctcatccatgcaagacttggctcgtcaaggacttgttatggctctccagcaacgtgcagtcacctatccgtggtgctgggggccagtattcgagtactcaaaagtattcgaaggaaagacctgtgcgacatctccgtcatctggttcatatttcgaattattgccattggatacataaagtgagccctagatagatattcacaaatgtcatcacccaaagtaagatccaaactggactttcttcgttagcaactgccgtattctcagcctctgccttgatattctgctacctggtaaagtccctttgccccggcgttatacggtacctgccagcaaattttagagcaaatttatactaagtattgatgtgtgtcaatgtcagtgttgtgatgagggttgtggtgaatgttcgggcaatgaaggaggtgctcaacgtctatcccacggggactgatagggacaccaaagttgaggtgtaactttggtgtccctatcagtccccctatcccaccctcagattatgtaagtttcctgaatagggggttcaacttgaacttctagaaatttatcgagcgatatccttccacagctctggaaggtacaggcatcaatattgtgggaccacaaaagagcagttcaagctctttgtaatggtgttggttcaaccttggaagcgagcgatcttcgagcccactctgtcgatgagcttgaaccttgataaagtctccatgcggtagagcgttcatgggcaggaagaatgacatttaatttccgctatctattgccttatctcctaaagattagcgatggccttggaggcgcatacaaccaatggtgaattttagttgggtttggtgacgggggtcaacagtgcacggctgttgatacatccaacgcattcgataatttagcatctggctataaatcccgcctggttgacctgattttgtgtaataaaacgggaataaaatcactgctcagccgccagctttccatccctcccaacccacgttaaatcgctgctttacacacttccacattctctttcatccctcccagcccacattaaatcgctgctttacacacttccatattctccctgttgtgatatgaggctggtacagatcaggaagcaagccgctccgtcggaattagctccgaagtgcctatacagacgaccaagttgatttccaatcaacttggctcattgttgtatatataggctcatgtatacctctgaaataacaagtcaattcatacctccgaactacaacactccctacagcgttcgacggccagtcatatagcagaaatgaacgaactgaacaacaatggtctgtacccgttgcctacgcgggcatgtactgcggaagaggaagataaaaagcctagtttatactttctaaaacttatataattatactctccctacatgatgacagatatcagctcaacaataatatcttctccagctgattacatgcaaaccacgcgttgaccctagacccttatacatttactttttcatcatgtcctgcaaacctgctgatctacaatgggtattgggccaagtattgggtgaacccttgcaccgtgagcggtgcatatgggtaggagatgacgggaatcattgtcaaaacactgtgccgcttgactccaggataattggagtattgtgctttgcgctgctccaggcccctccgttcgcgtatcaactagcgcagtaattttcgttggctgcatagcagttactttgctttgagtgcagacgccatcgctgtcggcggaaattgtgggccacccggattttgcagttgttggatggtcgccaagatcaatccaaagatgtctcgatgcactcaaaaccattcacggttaccaggttacagcatacgcctcttaccatagcaaactctacgtgtaatgacacttgaaatgcttgtgatacccattgcgaagccagttttatcaaagttgtagatatccgcatatagaataccatattactcaataacttgctggacggcggcgacccattgctgaattacaactggatctccacattgcgcctttgtggtctgattgacgcgagaaattattagggagctcggaatagcgctttacatagttcttcgcccaatacttgccggccatttgatagggtgttcaccgcgcgcgctacgcgagtatattaatcggccgtttctcgcgcaagagtggttggcaccaatttcacgatgatccatagaagttaataatctttatagcaaatcttttcactgattgtgttaattcatgatttgcgcgtgcagcaagacgattgatgggtttgtcctggaagccggcgctggagggtagtttcggaccaccaaatcgttctgcccttcctcgaatggcgggaatttcgggggctgttgtttatcattacattattatttttaatattattatttgtatgcttgtatagcacgtgggatcccctcttgacccggccaacgaggtctccaaatggtgcgttctggtggtagatgaattgtagtgaaaatgtgtggaggaacacgtggtcgcggatgggcgacccactcagttgtctgatccactccctgtccattacgttacaccttcagttgactctcggcaggcgggcgctggcgactattcagggtttatcgggtgacacgtctcttttgcatcatctccagtcacatcagtccatgttctaatccacagcctggtagttcaagatgatgtcacccctcagaatacccaatatatctcgaaataggcgtgatcagtgcaggaggcgggtcaaatgtgataagcaggatctcccgtgcttaaattgcatgtcgcccgaattagattgtacttacttgaagggtatggtatgcaatgctgcttcttcacgccctcaaagccatacagttcccatttcctactcgaagtctggctcctctccatggcagggtggtgtcaactcgccagagtcaaaacattcccgttctaggcaagtgaatgatatggaattgatccacaaatactctacggagacataccgaagcctttccgccaatgattcggagaattctatttagcaaatcactgttccatctctcgcacttcaatataaatatttaataaatggcatcctggccctggctttaatgtatatagccacgtcttcagagacctgcgaagcttcggtttatcttaacacgggcctcaagtactacgaccagagtttagcactatttcgggacgaactcaatgatataacgccacaaaattgcaacgccattttcgcaaattctatcgtcacggtcgccgtcaccgttacttcgtcactactgatggacacgaatagagaacactcaagcaaaacagataatgcagtgatcctcgttaggttgttgcagggtgtgaaaatggttcttcaaactagtcggccatagatcaatctagagctctttcctcataacgaatgctgggataatgccgtcgctaagctagacgtcgacacatctacagcacttgcacatttagccacattaaatgataagatcatgattagtatttttgctgagcaatatcgcaccaataagaaactcatctcccatctccggcattattatgccgaattcgcacgctctgctagacttagcccagtcctggcatagcttactgcagtggaagaagattttatgaaaagcctgagatatcgagagcctttttcgctactcattctcatatactggggcgtgcttttaggcgagttagacgagcaacgatagtaggctcgcgattcgggaagagccttagtatctgagttactagaagccttatcatctgataatccaagcctggagcatacattcacttagatccggcgcaagatgtcgctttaaggagtatcaatatttggggcttatattgatagttaattttttaggtcaggaatacattacagtatcgtctctgcaagttaaatgggccactccgcatatagattacagtaggagaattttcgaagagaaaggtataaagacccattacagagaacaatccctcataagaacgcgtagccatatacagtaatctacattagcaggagatgatcgagcgtcgaaagttaaatcaacttttcattagttcactgaatatacgattgttctcaggccagagggataatggtggatattccagcaggctcagcatgacttttcttagtctatgtacagctctttagtacgaagtctggactaatattctatgactaaaacggaccattccaccataccttccccaattgactggtcagcaaagagacagtgccgaagatctcttagtctataaataccgacacaatgttgcaaacctaccagaaaatttgcagatggcacgcacagtcatcgaactcgaggtctgccagaccctcttctagagaacgaaagcagaatatatgatacttgatggattctagtgctcatacccgatacgctcacggcaaagtctccgaaacccccatactacattgtataccctcgctaaattggccctcgagcttctcgattggtaatccttgtctatgggaatgctacatcctcaaagctgccaagagacgaggcgaggatgagcaccgacagctttaaaagttatataagcggctagcaagcgacagcgacatccttctgcagccctgtggtagtttgataattaggtactggtattttgggatcaagagcgagcagttcaggccgtttgtgacggtgtggtttcagcttttcaagcgagcgatattcaagcctacccattgatggaccttgctgaggtctcggctttattggacgtccgtgttagagcgatatttgatcaagtccgctatcgcgttctctcccaaatatcatcactgattagaggcccatgcaaccgccggtgaagtttgttcgatctggtgatgggatatcaacggttcacggattttgatacatgtacacccaacctttgattttagaggacttagcagccggctataatctttccttatttgtcctggtctttcgaggatgaataaaacccctactcgatggcgcgaatataaaggagcaagactcccaggagcacacagccctacaggtggccgcgagatgtggccaggaaacagccatagctgactttctgaacggggaagccaacgcgcatgccctaggccactcaccacagtatatttcaccgtcgatgatggggtgcccctacaagcgtgaggacataaagatgtattgtgatatgagacagggtgcagatcaaaaccaagccggactatcggacccaagttatctatacgaagaatcaagttgattgtgttgcgatatggggctggtgcagatcaagaaccaagccgcgccgtcggaattaatcccgagttatctatacgaagaatcaagttgatttccaatcaacttgaccttctcgttgtatatatagcctcatgtttccctctataatgatacctccataatgaaacaatcaattcatacctctgaactacaacaatattcaatccgcaatgacaggcccatagttcttgttctgattgctcctctcactttttacaacccctcgatatcggctgttttgcggtgttaaagcattcgtacggccagctggttgaattgaaaatgcgggttgggatgaattatgttgatgaacttgatttcctcgaagcgtaaccctcgcacgaattgagccttataaatcggagtctatcaaaaatagctaaatagcctcggacgacctggtttagtccctttttcacaggagatagtgatttcaaagcttgattttcagcctcgaaccctaaaaccccctccgagccggggtagccattgggacccaaaaacgccttcgaactatatccagctacaaaagcaagattcgccaactaaggaattgcttcgtacgagatcaagaagcccccgagcccgttgagtagcgcgataaaccaggttttaaagacctgccaaatcactatgcaatctacggctttgcttgagaaagaagtgagcgagttgcgcgccgcttgcgagaagcagaagcaaaagcgtacttgatcccagaggcagatacctgccgaagagggcctctcagttcaagaagcatctgcattgattatgcacccagaggaagcaattgaagcacctctctccggtcccggcatttacggagaatcgggtttacagccgcgtacaaaacccctcaagggcgtggaatctgtaggaagccaggaaatagaagagagacgtgtccaaatatataacgagtttacttcgttcaatttaacgccgttgtggttgagataaatgcatttcaatgggctggtggggttcgcagctcggccgggaaatacgttattagggtcggattgcaagatgaaacaaatcttgccccccagtcaattttcgtagccaaaaatgcctttttgatcctatcggttttgtgcaaggagtgccattggctgtgatgtgtgaaggtcaagcgatgaaactacgactggggtattgctatgtcacctttgccgattttcatttgaccttggggattgattgtcttcttgtggcaaataatcttcggatttagaggcttacatcaatttatcgtaggctagtaggctgagctagatctcttcaagtcccattgctgactccactctccaagggaccagtcctaagtctcatcattatgtatacctaaactcttgaatgggttatagaccgaccattttagtacattggcagtctccagcccagccaaaacctcttggcggaactgaagccatgggacttgaagaggtctacatagtatcgatactgtctcacgacgtacagtatgaaaaccagtgtagctcgttagtcagcaagcattgctaatcgactctgggaatcaacgggttaatcccggaaacgccaaaagcaattctagggctttttatttcctgggaacttctctctagctcctggggccactttctgtttctgtcaggatatacatgaagcatacggaacggatggagatatgatctacgcgggacccacatggtgtatatgggttcccctgaacgcgaggaagcctgttccttttgcttcctcgcgctacgtcttgtatagagtcaactatagttgttcttaatattgattattcaacttgaaacactatccacctctatgtatatgtgagaccctcacggtttctaggaactgaggtctacccctgggatcttcactctacattccttacggaatatgaactggctatgggaatacattggctggctcgtcgtgggcttcagatatcgatcaactatatagaggatagcgggcctctcccttctagagccgagaagagaggaaggtcttcagtgacaacacgaatgctcgctggccgagacgctcagattgacgcagagcagatctctggttatcctcccgtctggtgcgatgtgtaatatgtcatgcggtgtcctgggcctccatgtcgcaacgaaggacaatattgctggcaataagcaggggggaacaggcatcatagattaagaatacaccctcgtcaaatatgtggagcaaggtcgagttctcgcgacccacgaggacgttcctgatagtcttcgccagcagctctatgctgcggagaaccagcaaccggaccaaaaaaaaacgaaagctgcggataactctacaatgggttcaatgtgtcctccaatcagtatctatgtcctcccggcagtatcatcccaactatcactatcgatacgcacccctgctaatgatgacatgcccactaggcccgactgtactggatcaaccatggtagacggcctgctaggtgtcactgtggaggaatataccgaatggcaacaacggcggtgaacaacgagactttcagggagaacatcaagaaagcacgcgatgtaacccttgtaaattgtttcgacctcatgcagatttatgagggtcaaggccgaggctttttgtcaaacagggcgtgaaagtaggtgctacccggctgttggtgatgtatgtctacgacatgtgcgacctacagtactggggtatggagtaaggggccgagaggtttattctttcacctgctggtttgtgataatcctgggtttgcactgatcctcactctaccctatgaagaccttgttgtgaggtgtcattgtcatactttagttgtaggtagtgtgtggagttatgcctaaacgcttagatggttctaagtttcttaaaatacattgtagataaaggcattcctttattcagtcaaaactcatcattacgctctccatgcttctttctcttcggttgtgtcacgtattgctatgtacgtgtccgtggattatctcgcgtcggtggtctggatgtgctgggctagatacaccgcgattatgtgtagtagtgtggagtttcacaataagtccccacgaggaaccggtatatgttttagatactccgtttaagcgtcatgccccggtagtgttgtccaatgtaatatcctgtgcatgggaatcccggagggagagaggggccgtggagctggtacaaccatgacgttgtgtgggatgaagtgcagcatggccgtaagggcgcacggtgaagttgccggggttggtcggggtaataagcaatagggctggggtgtgttgtagaagtgctcaggattcgagacgagcgttgcagcacaggggttttcagggctgtgtccgaggaaaggtcgtttgggtgagacatagctgagaccggcaccaggattgaatcgcgaaggaggataacggccgtcgagcggatatcgttgttgctttggagctgaggcatcccccttctcgtgcactcatacttgaagcagcacaaatgcaagatacatagaaattcagatgccatgcatagatcaccaatctagaacgcggaggagccatactaaggacgcccttgctatgagtcttcctcccctgggccatgtttagaaaggaggtgaggatgggaaccgagcaaaccatataatatgtacagtgcggtggtggcagcatgcgattttaccattggctccttacctattttcatggtcaggaggctccaaatgaagcgtggaacgaaattcgccgtgccggcaattttgggacttgcttatatgttcgtatgctccgtttcccctttcatcctagagcttatgctgacaatgagcagagctagcgtggctgtcatagtccgtatcccatttttgcattacgcaggcagaccagacttcctttgtgagttgattcacatcgtccacatacgtcttttcgtctagtatagtagacgaaacaacacatatttcgatatggtcgaatgtagaacccagtttagggatcgctgccggtagcctaatgacgcttcgacctttgcttcgagttttatcaaaatcaggttcatcagtaacgaaccaacacagactcgttacttcttttccgatgctgagtagttgttctgatggtgaggaccttgaatcgccttgcgaataccaaacccactcttataattgcggtcattttgcaaattaatggagtcaacttcttggcttgcaatgtaggagatggaggggaaggtttgccacattcgtacagtaaaacaggtacactagcaccttcattaaccagctacttatggtgatctccctgttgtaacatattgaacaatgaaaatatttgcagtgataaatcgatttttgctggagctggggggttatctgcatggcctgggcatttccttgacgacggggcttgtcttatacttgtcccaaaattaaatagtatgtgtcactggttagcccttgggaaccagtaagacatgcatggagcactcggatggaggctagatataattgacctcggtggtttgatggtcacgctgatctggtttggatcatcaataaaacggtggggtaatatctaaaccgcccatagaaggcggttaccggtgcatcgatgaagatgtaacgagttaatattactttatcaattataaacaccgggcgaaagagccactgaccatgcggaaatcaagaaagccgcaaatataaacacaagaacggtttagattacgtgttcttcttgatcaggaattatcagacaaagtcagttatcattcacttttgaaaacttcgttagattacggtctttatcaattgcattactactctaaactatcaccgtccaaacccggacagaactgttacgggcagaatgcacaaaatagtttgccgaaagataggggataaataatgtcttgtcagaacttctctagccactttacacatctcaagttgggccttgacctattagttccacgcaatcactatagtgcgctcaactagttgctgtctacccctttgctaatcttttaaattgccatcaaacatcgttgttagatcggtggaggaaatgtgcagtgaaaataggaaatataatgaagaggcaacctcctgcaacatcatctactctatcagactaatggaagataaacaggtcgcgcttgtgtgtacatatgttgcattatattaagcaattcaatttattatacaccggcaacaagagcagttcgtttcgcagagaaagctatgatttcatatccgatcgaagatttggagcacgcaaagcggttcgaaccacatggccccggcggctgttgccctaagaaaaggctcaacgctcatttgaccacttgctcgatggattgagatatttttggcatctctcaaacactttctcttgggcgctttcttttgatcactttgtaccgaggcccatgttgaaaagcattatcgcgaggcgaaagacgcgaagggctatagctcatctcctgcttcggtcctatagagctaggctgaccgcgactgaaggattcatgatgaaagtcgccaccggatttacgaaatccatagtaataaagccgcctaacaagagattggtggcttttagtggacaacttttgaagtatatgcgtaggaaatctgctttccggggcaacgaagacagattgcccatcttctgaccaacgcattactgcctcattttttggatcatcaaggattctttcatatattagtacacagggtaacagtattgatgatccaatgaatgcttcacttactcgctcagatcctgaatgaagtcggatgcatgaagcctgggttctggccttgcatcgctctcagggcatgagtcagctcgttgcaagtcatccctcgcaatagcaacttctggtggagctgaatcattcagctcttcattgactggctgaactgaccggtcattgctagcattctggacagtcaaataggggcttgatgaatcttggtaaccggagctttcttgttctgtcgaggaaacaggaccaaaaccaccttgatttggaagagcggattgagcaccatccagcggtagagctcctctgttattgacgtggtccttgtttccagaaagctgagagactaagtcctgatgattccggagatgttgctcaacaagcgaaatttgttcctggactacattgatcggcttaagcttcctgtactgcaccacgggacaaaaatttcagagactcaccttcgcttattactctccgagcatcaacaagctcttgcaataccgtgtcgtttgattgaagttccttctggcaatcatctttatctggccaagggaagagaaaccgccaaggcctacccgagcgtaagagcctgaggtcattctctgataactcaacgctagaggttccgaccctaagctgtgctgggccctcaaactggggacctgcaaacagaacaacgctggtccaagtcaacggtggcccttcccttacggacggtattgtaatcgagaaaaggctctctagactcttgctgaggctgttgctagtcaaaacctctccgcggccaaaggcaatactgccaccttcatttaaaaccgacaaatgattggacaattcggtcgaaaattcggaaatggaggtatcggcaagcctaagaggtcttagacttttattatgatattgagagacaaagttgttaactattttatcaatagtttggcaagttctatcgccgggcacttcgttgaaaggagtggtcatcatttcagagcacaggtttgagcacaccctggactccaggaggcagaacagcagaacatcaatggcggtaaggtgcttgccgaggcgggttaaagttactccgtgttactaattgctagtcacagccactcgacgcacgtcccacatatagttacatactttgagcatttttttaaagccgccattctttagccaatttatttatttcggtttggtttctttctaatcttgttcgcctatcacataccacatttccacttttgagattcctacttgtacgcataatacgtatccattggttaccaattacaaagatatattcttgggcaaggaggatcgaatgagtcatgccagtttctacgacattgaattttacctcctagtaataacgtttcctgctgccaccattgtcgcgaaagacgagaaagttggaaataagaataagaaaagactgctacgtcgattttatggtgacggtgctggcaggaaaagatgattgtgagtacagtagtctgcctcaaattctttttgcacctgttgaataccaccgaaatacccgaaccactcaagagacaatattctataaatgtgtattttgactactagtattaatgatacgttctagccgtgttgtttatacaccataaactgccctcttagcgtcatcacgctttctcatgcccttgcttacaaaaagaatgcctattacatatgccgacttgaccgcaagatgtgtaccgtcaccaggtagttaatgaatcaaagctgttattgttgtctcatctttgtccaacggttatagaggagttagagagatatattaatacgcataggcgaagatcagtgataagggaatgcacggcgagtcgccactagccagccacctcacattgtaccgtttctgaccatctttggccacttagcgtctgctcagccagacactgttcccgaagctcttacctgctatccatttttaagggacatggccagctgcgccagacgaccacggccatcgtcaacatggaagtcacaggccccagcgcgcccggcctggaagatagtgattaactatagttcagcaacaggggcgtacctctccagctgaccgaacaaaatacccgcgcgacacatcatcacgaagtttggttaacctcaccctcagccaatcgttaatgaggcatgcaaatgatcatgagtgagcgcacggagtcaaaacgttcgaagaggcaggttcgacgagtgggtcacaaaagcttgcccttgatctccaggctgttccatttcccaggctattttatggcacgataagcagatccgttcgtagaatagagagcttcaccataggatcaagggagctatgggtatgatagagctctcgcatgcaaggctagaaactccaagcaaagtcacatcagcttggagcaattgaatctagactgtcaaccgtagttagaccatcccttctctctctaccgagatcagccccagccccgtccgcagcacacataccattatgcccaatctcgagggtgtctatgaatcgcccacccattcacttaaccagcagagtgcctgcagagtcattgccagcgctgatgagatattcgaaatgtttcggaccggctcttaagaagccgacacatagtcctgatcacatggccccgatcccagtcggcagtccttgccgtgcagcaaggtattagacaggcgatgtgagcctcgcagagcgcacgcaacaggcacagcagtccggaccctacacgtggaacctcaattaccaaatgtgtatactgcctgaccaagacttatctataccttgtatcctcatccacaatcacgggatgtgacgtaaactggacagaaccatactgaacttcgtatttgatagggtgatttgatgcaacgaacgacccgacagacgctgactgggccaccataccaccgtgtctactcgctggcatatatttaccacgcagaagaactgcctgtgtggcttaaacatcctccactaaattttcttcaagcccatccagcttgtgtggattctataccgcggtcgcccatatggcactggcttgctaaatcacttaatgtctatctttacgaaagccaatatactcctttcagatgcggcctatctgtgaattggccatatgaagccctcgactatatactgtcagacgaggactcagccggaaaatcaaacgacgtactcgtaaaatctgccctttgcatataaagaatatctctaactggtcactaattccgttatttgcggagagctagtcgtggctgatagatgtcgcacgacaatcaatagtaggtgacttactggcccaattacattgttgacatggtcgtagcccagctgttggggtattgccgtttaatctacctatattctttgtccgagtgtctggacctcgctgaacttggtctccgtgaaacctaatatggcattgcgattatcaaacaacgtgaatatctttgatcttggcgaacgttttccgtattggctctgctcatctgaacgtggttcatgtcgaatcggtttgtagaaaatcggatggagggctacaaggttgtggttgggggatttgtaggtcagttagcacgaaaaagaacagccctagagagaacaaatttcaactgtattcaaaagtctatcccgttgcttctcgtgcttgatagcaggaaagttgacaattcagcgccatcgtacatctcgatcgccaggatcaattttgaccagagtaatctagtggccatccctccggcgttagctgcccacagaattcagggttatagacagatgctgtcttatccagggtagccacatagcgattgcggcccttgcgtttcccatacgttgcatagtgtgctttaaggttgtcgcgacgcaagaagctgcgttaacacccaggtacctagcagaaatgaggcctctcccctgaatggctttccaggtgacgattaagggtctttcgaagtttgaaataactcctgtatccctgaatgccgcatttgaactgccgtcgagtgacgttggtctgggaacctccgaggctcaaattggacggatcctacgaggtatatagaagattgacaggctgcccgaaggcttagcggggttcagcaacatcattttggctatcgtgctatagtgcctcgagtggccgtgggtagggagaattgatattcgcttggtttgggaaaaggcaagttccaaagaaactcggcacatagtcaaaattctcaggaggtggccctagcaggaggtggttagatagcactgacgtaggcagatattcgagctaacagatcataggccgtgatccgcaatagatcgaacctagatcaatcgagcagcctggttgcccgtaatagtggctatcacagctgccttcgtgcttttgcactaagtggggcgacgcctgataaataactaggcccccatggttttaatgaaattccataccaggccactcggtagggctaggagcaatgtttgctttcaatttggcgctattatagaagagcgtttgtatgccatttgagaatgccagattatttctaccatatatttgcgaggatagtggtgtgatttgttgttctatctgtagacttctacccgtaaataacatatttgcagacatcttttgcagatagccgaaggaagtaataagcggtaaagtccgacacagcactatagatatattgtccagatgccacgcttaatctgtctgggtgcaagtatgggatgccgggtagaagtttttaaaaagttatgactagctaggagaaagtcgactcagtagtagcaacccttatgacctttggaatttccatagtatcaagcttttattcgagaggcgaaaagagtggccgagtaaattttcaccatcacacggatagcgttaaataacggagacttgctattttgcgttaggttacgccttgaatagatttgttacaatgatagggagttgacagataaaaagcccgctgattgaacggtggtcaaatacgtgcgaggtttactttaatacatagtgttgttaccgaccacaacctcaaacaaggcgtgataaatatgaacgccagggcctaacatttatacggactctcaacaaccttaatgaccatttcttcaactcccgtataccaaacctggctacccaaggataggtgatttaacacaacagttattagcaaaatggagataggggcgtccaacagctcgccaaagtctaagttaattggaaatcaacttagttctttgtatagactcctcaggatttattccgatggtgcggcttggttcctggcctgtaccagcctcatatcacaacactttccactgcgcacgtactccatgatagatatacccagaaagcacaataatacattcctcaaaaaggctgactggtgagaccacagtgaacctgaatggtagtccttgactgcccaagattgaggttaatatagcagacttcacggtgggaaatgaacgaggtgtccgataaagagtcctagtggtagttaatcactgcctcagttcgtcaagtaatcctattaagaagaccacgcatacagtttcccatcgtttaaacattcactttagtagaataacatacgttgctgcatcgattacgatcgactaaatcaaacaaatctaccatcctgagcctaagcctatacattgacagaaattttctttcctaggccatcagagcactagcctctgcttttggtaatatcttaaaatcgtgtaaacattgtgaaaaattcgagagattggttgctcaccttctttttacgaattttcgagccctattcaaagccagcacgtcttagtgtatagcctcaaatctcatagtatcggtgctaatagaactgcggcacaggctgcttggcatttcccgaaagccaagttgcatgccattacggaggcaggtgcactagcacccatagtagctccccaggtaaagcctactgccgagtagcaagccataataacagcggcacatcctacttggcaaaccccgtaggcggctggtccggcagatacaggagggatgaaaagtaggagattattaataagcacccacgggactctcattttttaggacctaaaagaagttgaaactaggaaccccaaagtatttgtgctgtaccaagagtatgctaagacaagggagaccatactgcctaaatagatagacattcaatgatacgtcgccaaacggtggctactctctaggcctcatgaaattttgcgttccgccgtttcctagaaaaaaaggcaaacggaatccttacgtttagaaatgcagacatacctcggatgtatcaaatgcaaggcgtacgcaagggatcaacacaccaattacattgccattttccacatgcagagagccgatttgtagtcagcatttcctgtcaccgaccgataggccatgaatgagtgagccaacgataccccggacttaaaaccagttatccacctcacagatccccacccaaagctcacgaaattctctcgatgtgggccgaatcagtattcgttcaatcccagaaccgaaaacataagtgatcatcctcgagagcagatatgcaagaacgacaagtctgtctgagtcacgaggaaatcgttcgacagagaccgtagaatcacgagcgcaaccgtctcggctggcctgatcgcccgcctgcatcagtttgcatcagtttggcctgttcatggcaaatattgaaacgcactggtgagaatacctgcacaaagtgaggcatgttatgacctctccttcaactaatttcatgctgagcgaaaattcgcttcagattctggtaaaccaaagagaaatactattcacggccgtactaggataggggtgtcaagttcatggaaacaccgtcgttgaaggaacgttgattgacagggaaatcttgcgcatatatatcgggcctcagcaagaactactctgtcaaaaaaagagcctagggcttcaagtatttcaatccgggtttttcactatccaccgttgaccctcatttaaaaaaaaaaaaaaaaaaaggggagactacctgtagttaacgaaggtgatcatcgaagtgattggcattctccgttagctgccagcgccttcatgttactccccactgacggcgagcctggaagtccaagcacgtcccataattttgagttgcgggtcgagaatctggatcaacgtgcctctgcttgtgcgagatggaccctctcacctctggccggcgataaaaaacgtaaagctactcgctctacgctgagttggccagaataattcctgtaaatacatctgatgttctactaggccggctacctgtttcgtaagcgtataaagggatatactaaacttcaaaaagtaactttctgcgtcgatcagctagtactacagctgcaaatctatttttaaaccattccgagacgcgcttaggcttaggccacgaaaagaaggtcaaagcttaccaagtccatacgcgcctattcctccgttgatcgaacgtaggcatgtatgaacacagtaaaacagcccatgttataaggctatagaagatgaatgctctagcatataaagtggcataatcgcgtcttatttgcaaattcgatcgacgtgaagcgttcgatagctaccgtgactattaataatcaagagactcttcaattcaatatcaaaccaaatgatcctggtgatatatgatttgactgtcgaacatttgcgtgatccttggttgtgatgaattgcattatagaaggtacattggggctaacggaaggactggccacgtggacgtttataggggaacttgccatatctggcaactgaggggtatactcagagattattccgggatcttcttcgctaagactgttttctgttggctgctagacgcgttcggctgacttagtctgctcggtcagagatggtttgtctaatggaaaacggactttcagtaccagcggatcgcgcttggctggctgggctggctgggctggttttttcttagcttgcgtctaatagagagaccaaggcagcgagcctgaccagaaataaatgaaggacttcgtcccctgtggaatatctcctcgtattcttgcgctatccgcgaccaactcaagtgccccctggtactcaagaaagcgcgcaattgtctcttttctaaagggctccacgctgaagtcatctttaagggcggtatgtgactctcctctccggatgtgcttagcgccgcaagagtactgcccgtctccccatcccgacaatggtcggggtttggttctacatcaattctagttttagtataaactgcagaatctgtgtttacatccacatcacatatatggatttcgacgggggactccgaagattctgatctggtaaaatctctatcggcgctatgggtctgttcttacgaaatttggaggattgtctataccgtctcgttaactagtagactttagcctatagacccccccctttttttttgacaggggctatgtatcaccctcactttctgaaatgtcctctcgcaggcgagtcttaaatctttgatcaactcagttctagcttctcgctctgcttgcacatcttcgggttcaggaggcatcaggagcagcttctgtagcaagttggatgaaagtatatcacaatcgcttttgctcaagtctaataacaggccccgaatgcaaagtcgatactggtcctcgtcacgtagctcaatttgattattcaaattcgattctcagatgagatcaacccagctgagatgacctccgcgaaggctgtcgtcactagccaattccacgacccttgggcgagagctactgaataaaccgtttatcctgtcctctattttgttactaaagagaggcttgtagagctgcttggcgacactgccgtttcgatcaaggattccgatgtacagtctcatcagcttcagaattggctgtaaaccatggcgcaccgtctcaatccgcggcagcggactagatacccgatggccgaaaaagtcaatgggctcagtgggcatattactcataggacttgggattatactggcgttttgatggaccggttctaccgaagagaggagagcgacctttattcaatccattgccagagaccggatccctgccgacacaagagtagagaggactaattgaaaagaattactcgaaaccctcagtggtaatggaaaagggggaagggttgccgtcacacaaccaaaaccgcttagtaaacctgggtactttgttattaatgccccgctagaggagcatgattcgctgaggctcttgtttaataagagtgtggcatccgattggttgtgctagccaacacgatggattaaatcgaccagtgatcggagggctagaagcgccgttacgacactaggagcgggcggcggaaatatcgagcagaaaattctttattagtaaccgaacacagtcaagagatctcgacggatccacacatttggcccttttccgccttactttttcgtaaatgtcatatggcttaacctaccagtttcatacaaagctttaagtgaaggtttaccaaagagatctggacgagcaaaaaatgaagattgtagtagatttctatgtataattcatattgatctgttgtttatggcccgggccagggatcgggcacggtccgcgcgcggtggaaacccccggaatgtttacccctgatattaggaccttcccctcttttgtgtcccatcgtacacttcttgggctagggatgtgatgatagcaattcagcacaaattgcaaagtattgctgagtgacctgaatgaccaaataatgattccggtgcgcagaccaagaatgtaaggcgttttaaggagactttgaacgagcatgaggtctagtgaggggggcagctcttggttcaccaatctccatagtgtgacaaaccatccatggttccaaagtgggtttagagaccaacaaggaagggagatggtctagttaatcctcgccgtcttaggcgctgttggtgatcaaaacggtcgaaagctgccgagcgatcatatttaggctcggtaccaaaatttcaggaatcgtagaaacttagccaatcggaattgagaagctcctctaacatgcggacccgatatagtgtcataacgcaaggaagtaataccgcgaaaatgtatcaaacattgactaggattatcgagcgccgtccgctgccatgttacatttcaaaaaattgatttgcaaaactgcatcaaccttcgcttggtgatccgaccggaggagttgggggcatcattgctgatcgacgggaaactagccatcaatgaggtgggagtgattgaggctgtctgcttttctctccatcgatttgacgcaataaacgggatgtagtgggttcggagtatcattattcccttgttaggcgatctaacgctagaagatgcagatatcaacgcacaagcccgcaatatggatgggagattttgtcaagatgcaggatgatattatcttttttaccatgtaaacatgtgattttttactatgcatttgcttactaatagtgtctgaccagattgttaaattcaaaccattgttgcttttagttagagaattgtaccgttgtggattttacccgtacgttcgccatacacctgatttctgttggatttccatttaccgacccttgacggaggtggaagcaagaaccacgtttgtaaatgtggaggcctaataggctgccgctgcgacagggagtaagaagggtcaagaataccagttgttcctagatagttccatgtacgctcttgcaaactcagtagaacttgattcagatatgtcagtcatctgctcctaatgttgaagggttgtcttggtaaaaagaacccttgaaaagaggaggccgaaaatgctaggacatgaaatatgacaggttacttagagaagaatgatgttattgtaatttacagtgaatgtttgaatatgacacatagctgactcttgctcgcgggaaatgttcaacgggtgtgtaaccactttgggagcgcctcaggagtttggcatcttcgatcccatttaacgcgtatgttattgtttgccgatcaaaaccaaaccaaccgaccctattagatgtcatttagagacacaactacgcttccacaaatcattttatggcatcgccgaacgaccacgagagtcatttcgttagcaaacctcgcagaaatcaggcgtttgtctgttctggttgaaaaaaaaggatgccctgccagttcgcctgccgcttttctgaatctggataccagacaagcattctcttggcgagatccagaaacccttccttctcctctccctcaatgaagggagcacgtgtcgcgtagtttccggtcggggatcagatcttcgcaaagggttgacccagaatggttcgttagtctgggaatacttggatagaaaaacgcaggcttcggaaccaaaccaaacaaccttccgtccaaatgggtcaagaacaaaatttattgatagcatacagctccgtgagtgtccaaatgatttgttcccgctcgcttgttcatgtcgacagctcagcaacgcggagaggaagaggcatcaaggactctatcagatgtggttattgggtcttactacgctccttgaattttgagtcttgcattagtcaggcataccaacgtctgatctgatgaaccaaatcgactggagactggaagaaagggtcgagtcagccgacgtggtacccactagcgactcatcgaagcgaattgtagtcatgtggaatatagagagcatgcgaccgttagttgttggggggtgggggttgagaagacaagacatttgctcgcttcgcattctaggcacggaaatctgagggtgtcttcctgtggtgagatccgagttagcaagcgttggtccagctgtccgagatattggatttacgatgaagcatttcccgagtgtacggttggatcatcataataccagcttaccaactagatcattgccaatttgattctgcaaagcagtcaccattcatgtcatgttgcatccaggttcgccgcacttctcccactgtcgcttcgagaagccgtgctggatgcactggtcaagttcacaagacggcaaaggcgcgcgacgaacctacttgtgacaagaaactgtccagtctgattgggagaccgcttcgtgtggacagtgaggggctccgctgttcagtgtgtgaagatggtgagggaggggaaagacgcgatggcccgtcggccccttggtgttgtagttcagaggtatgatgattataatttcagagggaacatgaagctatatatacaacgagaagatcaagttgattttcagtcaacttgattcttcgtatagataattcgggattaattccgatggtgcggcttggttcctcatctgcaccagcctcatatcacaacacttggtcttgcctgactcggcaggaataggtcactcgcgacaggtgttttcgcgattggcggtgggctgctcctacaatggcgtagagatgtcagtgatgtttgtgtccggggcacagacttcgcagaaaatcaaaaccggcgcagcaggaggcgcgatattcccctcacctcatcgtggagaacgaacgtctggagcttatgcgtcctgtttttggccagcgaccttggtttgcagtatctcacataggacatgctgcatagtttgaagtgacagggtaagaatcggtgtgttaaccatgatcctgcgcggagcactaacggagtgccggttcggcctcactttggtgcgctgtcaacgatttccagtccatcgtcagcttgtcgatcgacgataaatgcatgattcacaagttctgaaaaggcgcgggaaagggctccatgactggtgtgtattggacagaattcacagacctggtggcttcgcatcgtctttgcagtcagtctagtcgcggaaagggtccagacaacttttgaacttatgaatagtgttgagatagataccttgttgttgcacttttattgttttccgtgctgtaaattttacaacatctacttttgggatttcttggcttttcaacgaatgtggaaaaagtgttgtgattgggatattatatcctttggacctttcaccagtaagccagtaaaaatgaggcacattcaccaaccggcagatgtatatacatactatagtggaaatacttaaattcggccggttccatgggctcacaggagttgttgctgtcctagcaaaagaacaagaatggtttgctatattcaagtgtatggcagacagcatggaattactacggaaactgcataccaacatattcaacttctagagcaggctatcaatcacaaatttgaggaaagtgctcattggcacgggaaatgctatcaccaggatcgcgtacgaccccacccatcctggctccgaagggatcttgtctatgcatgtgcaggggagaaggggaacaaccgcctgaacgaggtgtggtacaacacatggattttccgcatcaatctcaagattgacggcgatttggatgaacggaccgcacgcacgctgctagggttacacatgaaggtggagaggatccagtttacagaaaggagtcccaatgaaactacgaagcgtatgcgtgaattgagagacgagatcccatggttggcggatgggtcggtagagatgagaaacacgggggattgtcgattcttcggaaggcaatttgagattggaagggatatctgatggacgaaaacaggaaaggcggaaggaaatgctacacgtccgggaaaaatgattgttcatcacgtcacaatgttggatcccatgccacgtgatgtatatagatttataggagcgtctgcccaacaggcagacactccgctaggcagcagggagatgagctgctgcaattgcaaatagctgtatcctgtattcttctatttttctactaataacctcaattcacggcctcaactcaacgagcggtcaggtgaattgcacacacacagtaagaaatagatacataaaatatatactaaagagcgaaactttccatcaaggttagaaaaatatcaactaagcaatgcgcatgcaattgggtgacgatgtcagcgaaggtgctgtgcgcacgtatcacctatgcgagtccctcctgcctgcttttgacaacttccttcttcttcttgtagttcgcgtcgttgccattgataatccttttcccctccaagtcatccagaagatcaaggacgtagtcttgacagttataccccgggtattcgttgtggatcggcgcctgtctcgctgcctctttgattgaggtaaccttggcaataggcacatcgcacaggtaaatcagctcggaaagtgttgctgatttacgggcatcggaagctctcatttcgaagcggtaattggtcgacgaacccatgatgtggaggactgtctgttccgcatccgtgggtccgttaacaaagaggctccagtgtttgtagacacctccgtcattgtagatagcgacatggattcctgcagtcgaagacatttgtaaagtgtagacggctaccgtaagaactttgggacgtggtggatgggtcttcgagcgtaagaattgtaggatacggtaccgactgttggagagcaacagaaaatgcagcaacagtaaaagcacagaaccgggaggcaaggctgtatttggtaaaagtaagaaaaggccttggctaagagcgatccggtgccctgttcagacttaattgaaggagacggaatgaaatggttctgagattagggagaacgatggttgtacttatagaatacactgaagattagatactactatacatttgaaaattcacgataccgcttggcaaatgtcaagcagagcaactagccatccatacatgtatcatgttagaacactgtcgtccaatcaattagcgctaaggtgtctgtaagtgataccaatgtgcatgagataggcatcgaattctaaatttaggtcgaaggaagggtttcctagctgctgaaaccaaagagcgtcacgctattttcataaccatgtaagcgctcgccatgtgtgacttgaacgcactgacctgttcgtaaatagggacggattggcatctcacagcgaatcacaccaaactcgagagggacctgcattgattagcgccggcctcgacctccatcccaccaatacaagattcccattccctccgaccaccatagcgcctaaagctgcttatctattggaagtttcaaaaatgcggaattagatggataaataggggttagacaattctagctaataaaattgatctctagcagctggaatctaccttgcccaaggtttaagctatgtggaccggacgtggatcccccaaagtcggtcaacaagccaacgtatagaatatttagaaggcgagatgctctctggtaagtagagaaaccagtcgtcttcatccactagactcagggtgcgcgttagggtagtacactcatagtacgccggataaaagccgctgtcctcccaatcaatgatcccagtgacaatataatgaccattgatattccggtcctttgtcaccatgatattgtcaaccctaacatcaccatgggtgaacaccaatctatgtgccatatcaggactatcatggtgtaggagggatcgaaggagtgtgacgtatgtgttgctgccatggtgacgggccgaaaattgcaggttgctaaactccatggctgtagtgatacctttgaataaggcacattcgtcaacgcgaagctctttagccccttctccgcgaaccccgccgagcgcctttccctcgtcctgttgaagagacctcaatcgacagaaaatgtcttctagctgttgttggatcgataactttccctcatgtgacagaacaggccatgcttgagccagcgttgtgcccggaatataggacatgaaaataacccgaaaaggaccgaacgcgatcaagccgtagggtctcggagcaggtatatcgggcgcccgctcagcaaggaattccatgctcgtgtattcggtgtaatccctattccccaagatgactttggcaacaatgtcgtcgttgcacttaacaacaacgcctctaacagggttttcccacaacttgggcgaattccaaagaagttgtttcaaaggcacaaccaatgctttcccattgtcacttgacccgacttctaaagcatattctgaaaattgcgccagcagagcgaccacctccttagacaatggaaagatgaccgtggcagtctcggcaagatcaagccgtgtgcggaactcgggggcttgtacctcgggagcatctttctcgaccagtggcaataccttcggtccagtcgccatagtaatctttcgattataatttgtcgggaatttggacagcacgttgacctcgggttcgtccctgagtgtatcacggagctcatgcaaggttcggagattgatttccgcaggataagatagctgacgatattgggaattccgatgttcaagacgatatgagtcggagaacattgacatcaggtcagcctctggattcctttccagttctgcctgaaatgcaaggataagatctctgttccattgtgctgcgtccgcgttggagagggaaagagcttctgggtgaggagtatcacccatagttggtgtcgttgattgagacaagccagtaagcctaaagatattctcttgaataacttgagtgtggccaagagaggcgagctctagggacagatagggtggagccccgtgaaggtgggactcgcctaggctgcaataagctgatggcgcgcaggcgtgcttcacgtgaccattattgtcttacccaccccacacgtaggctaagctcctgggagtgaagagtgggtttaccaggaacttgcaactctttaacgtatcgaggaaagatgccaggaagagcgcggaatagatatataccgaagtattggtctacctgtgagtgttgtcgagttacagataatcaagcaaagactcagtaatacaaaacgcaaacacaagtaaacaatgtatgactgaggacggagaactaaactaggtacatgaacgcgtattcttatatatccctgagttcaccccttgtgatgagtagatagtagagtggtaaaatctccttggcagattctactgttcgaccatctacccttctacaacctgtaaggtcacgtggtcatgtagctccctaaaggggtaaccttagatgaaggtgacatccggtacagtgaagtacatatggctataaattcccctagcttgccctcattctgtgtaataagagatgaataaataactgctcggcatccagcttttcatccctcccagcccacattaaatcgctgctttacacacttccatattctccctgttgtgatatgaggctggtacagatcaggaagcaagccgctccgtcggaattagctccgaagtgcctatacagacgaccaagttgatttccaatcaacttggctcattgttgtatatataggctcatgtatacctctgaaataacaagtcaattcatacctccgaactacaacactccctacagcgttcgacggccagtcatatagcagaaatgaacgaactgaacaacaatggtctgtacccgttgccttgataatttcttgcgctaacattactagtctacgatttggatctcgtccttcacgctatctggcatgaatcttctggcataccgacaccgcctccctgtctcgctactgatcccaatgatctgtggcaggattcttttggcaaaggcgaccctgcagaatacgaaactcaagagccttccttgatcgaatgccttttctatcccagtctcgacagtctgtccgggttcaagtggacaggtccggatcctctgactaactctactcgggctagtgaggttttcctccacatgtcagcgctccttttccctaaagaggtgcaatggatagaatttcgatttgtgcgatttgtgcgggtgtctggtgagactataggagaggatatgttcttcctgccgcgggttgaaacagccctgggaaatctgcgtcggtctcgcagacagttgctagacacaatcgcctggcatactatccgtataacaggcactagctttcgactatccctttggcctcgtacggaatccctaccgtattcgagtctctcgacacattccctgttgactaggcttcccccgacgctacccctagacccacggtttttgtatataatatatcgagtaattaagggtgaggttaatctgaatcgagcgggattgttcgtatactcattttagtaaagactacgataatgaaaaatgactatttggtgcccttcttattaaaagtctcgggaatatataacctgctttgcatatggtgtaattccccttacactgtatcgccgcttgtagtatttcaaagttgctaatataggatagggtaagccgaaataggcaattccttactcttctcttgcgacgtccgtcaaccctaccaaattgggactgtaggggtagttccagtcatcgagtaggctagtcagtcgttcccgagatgattccagtacctacttaaaaaagcgcagtcgagctagctgcttgtcgtagcgaagctgaagtccgtccctctcttttcttatatacgtaccagcctcctttaagatcttattactctactcaatcttttggacatcgatgtgcttggaaacgtatgacttctataggcgtcgatagaatccgacgagacgggctgctgggaatgtaaacttgggatcgtcacgttcgaggtctgctagtacctttaagatgggttgaaaaggctcggtcgctaaagaatgtcttgttacttcttcgtattgcgaagtcgaggtctacgatggtcagccaaagaatttgaagccgaagggtttcacttaccaatggaaggacatgatcagaaggttccagattactgtccttattactaaggtttggtaattcatagggccgctgttctcctttttcctggtctggcgagctgttcgaggcatccattttgtccgcaggagaaagtcaaggtctgggcgatactagttccatcaggccttggtgtctcttatagaatatgcagccgcaggtaactatgtactgggttttacgatcaccatatagtcaattaacgcagttagcttttggatggaatctgtttttatttctagcgggcggttggcagtcaatttgatagaagtgatagtaatcaacgaatcggtcggggaaactgatcaagtatcacgatgttgagggccagatatgaaccctcattgagatatatatttcaatcagacacctcttccacttgcgttgaaagtcttagggactcggcaaacagcattgtagaccttagagtcaccaaaaaaagaagttcggaaagaaaagggaaaagaaaagaaaagaaaagaaaagtatcttcgaagattggtcacaaattcaaaaattgagtgttgacaacgtttggccaagcttcaacgggttgatgggttgagcaaccgcacatcctaccgtgacctcgctttctgcagtctagtctaggcggacagacctacagctcaacacaaaccaatactaaagcgaggcaagaaacaaaggtccatgattcctagggatggaattgtaggagcttttcggtgatccaacgttgagtcgctcatagatgcgctgatcaaaagcaagagatatgagcatgtcattgtcgattatatttctcccacaagcctcaattaagagggccgtgaaggattcaacagtcaaccaacgttgcttgaccaactcagcatccctttctctcagcaccactcttactcgcctctcgctgggcatctaaaggcattaagaatgtcgctgcaaatagttgcggtaaaagaagacgtgggtttcaacaggcctcgattaagaaatgtgtccttcaacacttccaaccaggtcggtgagtgacagaagccgaaaagcctataaatacgtcctccacccctgcaattgctctactatttattcacttgattctgcaaagtcgagcaggcttgtttctgacgcactcgataagttctcccctttgatcgagtactggaatttataccgtactgacatttatagtatacattgtggaccagtaaaccagacagttcctgtactttaagagacgtggttccaagcagattcactgcccatttacgccagccgatcggagatacgagatttggattagctagtcaaggcgtctatgcgaagacgtctctgctatagctgatctgctatcgcggctctggttgaccacaaatttgaagtgcaactgctcacactgtaggtatatgggcccacaaatccttgaaactgcactgacccgaaagacgcgggacagccaggtccgtagaggttcgaacacaatgcaccagggcaagggccacagcttcttgtggtctcttcatccctggtgttgaccatcagaacatgtgagttatgggcttccacgctgatctactggctaataattgacagtgaacctttgagagctcaccagagtggccctgataaccttgcactaccgtcagtgctccacgcaaagccatggcttacacactattcctagccccgtcgcttcgaacaatgcagcacgtcctaggtggaagatcgcaaaccaagatagcgagtcaataacagggtgcggccatccacgtgcgaacttcgttgtatagaaccttgagactcccattcccatgctaaggtgagtgagatctaacgcttacagctgcgctgtctaattatccgcgccaagtcttattcccctaaccacgaactccactaacatcttcacgctattgtaggggcatcctatcatcgacggtgaaatatactgtggcgagtggcctattccgccagatcgaggataagaccgaggtggcgaccgacgagggtgctctatcgcgtcttccgccctcgtccctaccgccttcgcactattgtggagtcctgaacctctggcatcgcgacacattcatccaccatggaagtgcaatatttatcgcaagcgggttcgtaacgcgcgtttactatctcaacaaattgtcttgtgcaccccagcgcggcttttttaaagcgagtgcagattgcgataagcttgaatgcgacgtggtatggctggtaactgcattgcagagagttgtaagtgatctagttgtgaagccgatatgaccattgtgcaaactgatcgtcacgtctcaagcgcactttaggattcccataaacaggtacgctacgacagctcgtctaagatcaatccttgctgactcggatcgtacaacaggaggacaccctcatttctatcactcgagtcgaatgccacgcgaacaaatgtcttgtctgctcgagctcccctatacaaatactgtcgcatgctctctgtcccttccgcatgactactatcgacgatgagtcaccagaatattcgtatcgcgtacctcggcctctttctccctagattctgtgtatcaggtcattgttcgatttgtctacatgatacaactcctgaactccgaccagcctataccactacccgaatcatacctgtggctaagcatgcaacctttcaaataccttcaagtggcgtaggctgctggtatcgaatgcgtgatcctcgttgtctgcggatgacatttgatgtctttccagaagtggaaaaaggcgcaggaatgctgatgttttgtcttgcttcctggcagatgagcgtacctctgcagacaatcaggctgttagcacaagtccacctgcaaggggaaggagacggaaagtcttctcattcttagcctacaatttgacattggtcaaaccgagagggtaagatcggggcacaggcaagccaatgagagctcactacccaagaatcacctcgggcatacaggaacctgcatcatgagggctgtcaaaagtgttgtggtgtacccggttggttcttatgcacgcgtttcaagccgaagcactatttgcaaagaccatttaccctgggtctcacttcagctgcaggttagtcaagtcgaccgcgcgtatcttttatccgttcatatcgtctcctaacatatcacgcacttgtcaggaaatccgttttccctacatcccctatttcgactttttttttaaaataaatcatatattcgtcgagcctaccgcgccgcggaggacacgtgggcatgttactgttcggccaggcagccactgtaaagaatttggtgtccgaaaccagaatgtttatgggacctcttggactagcccctagatcctggagcaattttcccaccgtcaatcaacgctcatgtgatggttgcttttggaaggatggccggattgtctactacgactacgagcgaactagcactcctgcgggggatatcacctaacggatattcgtttcagacaacactactagaacctaatcgggtttcaatcaggtcttaaccgtgttctcttatcagcagaatatggttgattgtattaacctgggacactgcttcctaaaaggcaattgccgtcacttcgatccgggattggttgaaatatgatccgtcgttgccgaggcatagtaggagccaaccgggtattcttgattgcttgcttgtccagtctctcagcaacatggttgtctctgtggtaaaattactttgattcttgcgctctctgggatataagagctggaatagggtaaggtcgagtgactcacaatcgccgcctgaagtgatgactttgacttcgtaaggcacaaagcctaccgtatggctgattttactcaagctaatcgttcggtacctcatcatatgcttctacacgtgggtcttgggcgtattgcttgatcatagttgaaccagtggatctactgtcctatcggactgaggctgtatgcccactttaccgagtgatcagaatgggactagaaatggcttgcgaaatagaatcgacagtgattgatacatttatcatgtgggtgagatggcaagaaaatctccgtattacgtccgtgtgacattgatagacctcgctactgcctataaggcccatagatttgcactgagttactaccccctgcctataggcgggcgggcggttgaccgaagccccgtgtcatataatatgtccataggttgcttactaataagcactttggtcactgaaatttcataattttacaatgtttagccacatatgtatatatcctatagtactacgtattcaggttatttaagtagaaaaggatacaatggatgtgtccagctataaccaaccctagtaaaatcaatggaatatcgagtctaagtgaaattgaaagtatggtccgaaatgtatagaaattgtgatacgtctgcattgtgtataaatatatacatgaccacaaaacatgctgaacctacaaaaccacttacaatataatgcctaccagtcgcatctgtaaatttattataaacacgacatattagttatactacatactaggattcacctttattatgatcaattatctgctatactagtggttattaggggtaggtgacaagtgatagatttccaagagttgaacccccctattcaggaaacttatataatctgagggtggcatggaccgatggcaaggcctagacattgaccacctttttcaccgcccgatcaacacacatcaacacttaccaacactcacatcaacactcacattaacactcacatcaacactcacatcaatactcatatcaacactcacatcaacacttatatcaacactcacatcaacactcacatcaacactcacatcaacactcacatcaacactcacattaacactcacattaacactcacatcaacactcatatcaacactcacatcaacactcacatcaacactcacatcaatactcacatcaacactcacatcaacacgctcaccaacacgctcaccaacacgctcaccaacactcacatcaacactcacatcaacgctaacggttcaacgcaacaagcattcctagacaacactcatctctgtttgcctaatctgaatgaaagatgccaatttctattgtagcgaggaagctattggatcataagctaccaaaggaaaggaatgtgaaatacgtcatttgatactgaagacgctttagttgttagtttatgattttggctattgaattggcgaagatctaactagggctccttctatgtatctaatgatgacccttcggaacaatgaacagacgatgaagatgttgcgcaggtctttgcttcttcgagtactcttgaatactcgaatactggtctctaaagatgttgcgcaggtctttgcttcttcgggtactcttgaatactctaatactggtccctagcaccacgaagaggtgcctgcacgggctagagggactttttgtcgcagatgtccctgcggagactcttggtttcgcagatgcccctgcgaggcgctttgttgacgcagggcctaggctgcggagaacttggtaatgcagcggtctcctgcagagaacttgttaacgcagcggtctcctgcgggtctcacttgtcatcacagcgtccccctgcggagttcacttggtaacgcagcgcccccctgcgaggattgttgttcacgcagacctatcctgcgaagcacctttttacactcgcggggctcgtggcagcgagggagcgcaagtcttacatcactgggcttgtggcagcgacagccgtggtcacggagactctcaagcccgcaggcaagagagggatactatgacataccggagtgtgaggaccgaagtcctgaatttttttgggctgggaatcgggctccttttatatttttcggctacgtctctaccaaggaaccagttgcgcagttggtagtgagagtcacggtctcgttaataagcgttgaagtaatttcaacgacgttgaaggggtgtttggagactttgtggcctatagactcaagtctcgacctggcctacttcctcttaaaattgtgcgttgagtatggtgaaccactttcatcaactgttgaaaagaaagcaacgccgcaaacgtatggttcgtacatatcatcgaatttgcaattaaatcgcttaacgcgcttacattctacatgtccccattttaaccacggttaccatttcttaatgagggttgaagtgcttcgacagatgccgaaataatgggctggagatggccgacggaaacgctgtactgtacctgcggttgcccgaggaccctttggtctcactggtatcaatcctatccatctctaggctcgcgccgctgaatgttggttctttcctttctactcgcagctaacccatattgcctttactaaaatctctactaggcgcataggcactgtcatacttctaaactcaggacgaagattgtcttcctttgggaagatataatagccaaaaaaggtctagaccctttgaaaagctcataagaaactgggtctagtttccaggacaaccatataaactgatgcaaccaaggcccacgagctaggttctcatgatcgccacccccttgcaagattgtaacgctactatcacactgatgagaacctggacacaaataggaccaggcagcccaatcaaacgctacgcgtgaatttagacagacgcaggtacggttctgcgatatagatctcagcgacgacccacgggatagtagatcagggaggttctatttgtagagagaaaatggaaacaattgcagaggtccagatataatccacaagcctaaagttttcggccattagtgtccgatagaacgggactttgttgcctaggaggtactactggggcaggtgagtatttggaatagtacgcagactttggcgacacaatggtaagctacaacccgatccgtggttgtgttcttggtcgcagttatgagaaggtaagttcccctattaagtggcaagctgaaatttgcctatctggtctgtaggacgttctagatgctatgtatcttctcctgcaataagctgataattattgctctctttaggctataataacacttcctctctatatctccaaatctaccgctatttcaataactctagcagacgtattataaagaactatactaattatagacaaaccacataagcttaaataaaatgcctctgttttactaaaaccggttggcccctggacaagattttattgtagaccggccctcctgcggccctaaactttatttcaatcaatctgcgcctcttgatcaagatgatgaatttaaaggaactttctaataaaatattggtcttactgtagtgaatttatcctatataccggccgacggagattgtagtgattcttttctagttcctatttttaggctgtaaaggcttaatcacaagcagcccagaaagtaggtaggaaaactcccagacttgaattcttcattataaccgcattctcttaccgagcggcatttctatggttcatctaaacgagctctcgaaatgatttgcggtcccgctactaatcggcagtcccgctcgtggttctgtggtctgtgccgaactttgatttccttataacttaggcgtgggttaaaagtaaatcggattcactctatagatcactctattttcgaccaccgattcaactaaacctaatcatacatattctcttaagctaataaggttccagatactttcagtcccagagtccccttgctatcctgtcctatctccctataggaacgcgtatagtatcataagtccttatacactatccgcagtattttacagctatatagaccattcccctggtctagaatgacaggatgaaactgtgtcgctgggcctactctcagatatacaatcatactcgaatacttacctttaactttggaacttccttaccactgttgtaattctaatactataatcacgtttcgattttgaatagtaaaatacaaatagataaggtcagtaatacccctagatatattatgtattattactgatcccgcctcgttgttgtcctaagttaagtctcttagcttaagcgtcctaagctaggtaataatcaacccctaaatcgctgtaaaatggcgcgaaactcgagttcctagcagcgtactatagtcgtaaatgataagtagtaagaacagtctcagtatattataaataaccaaaattacactttcttttcgctacggatactggtatatgctagtattaggtgtcctattaagacgcattaattgtttttctatctggatcgtgctgttaaagtgttatcggatcttaggagtcgttctcagcgtgatataacgctaatatgttgagcgtaccccgtttactatacagggataaagagagaataacgaataaccttgtccttagtggtaaaataccacccccccgccccctacagtttaatagtaacagttagcaataaaagtaatttcggagcaattaagtaatccaatcttaattatatactaaatttgttcaagatataacgattttaggtcttccgatatccttaattagtaatagacttggttcggtggtaagtaaggttttcactttgtcccaggtacttatactgtaaagtcgggaaaaacagctgatttcctgtgattgcttccacaagcatatctcgttttatattatcgcgaactcttgaataactgtagatcttatgttctatatcctccagtgcgtagcttaatctctacctaaggaaatatagactgggaattattgcttatatccgatacgaaggatattcgaagatagtattatgtttaaggccttccccctcgaagaccgcaaggatacgatatttattagtagcaataccacctttaataaggtattccttataatagggtgactttcttggacctagccctgtatcaatatatttaagcctagaagcagcttcctccgcactatatacgcctgccaaaccctctacctatatagtaatcacaataatatcaactcttccttcatcctctagtattttacattactgtatggcccgcctctaagtgccgaaggataggaaccgcgtaggtttttagttctaagagagatgattattaaagtctttccgcgatagcgggcttttgtctcttttccgtacacataagtagccttctctgaagcttatattactgctgcactcagcgcaaaaaaggatagagagttttacgtcagctggtaatggatcgaggaatatcttaatatagtatttaagatatactagaagcatataactcgaagtacagtgagaagtagtatgtagtctgttcttggtggcttagttgctacaaactgaataaataatggatcattgccgcccagtgtataaggtcgaccgacctttcgggtagctattaaccatgtgatagtctgcatatccacaaaaataataaaggttataacactatataactacctaggcaactatggtgagttctaggtatttatatccatattataggttatactaacggccacggaagaaattcggtactaaggttatataatacttacgaccgtctaaatatgatttattatatatacaattcgcgcaggtaagaatactagggaggtatatgccatattttgaagaatatggatctcgatagaagtcactggaaactgcctaagcgaactttccgacaattgaagttatttccctgaggcactaaggagatatgcctcaatctcttattagtataaatactgagcgcgctcgactggtatattgtttattggatatctgcagtagaactgctctagcttcgttaaggcaataaaggacaaaacgatatatattaaacctaaaccagctatttagaaagggccagtaatattgggaatactgagactatatccttttaaaagctaattactttaatctacagttaaaattgtctaaggattagggaatttccaaatttatatagggatataaaacacattcacgcggttgtacagtactcggatacggatatagatttcgctgaagaaatttaagacgtagccactatcgcttattcgatatagtaggaaagaatagcacggagaagaatctattatagaaatgaaaaatttgttacctttatatatacctgtaaactaacgggagcttatattccttacagaataagagacctcttttaggaatttaaaaaaagaaccacaaagtaatgtatatctcggctatattttctctatctgacctaccgcaaataatctttttcatcacattatttatactttatatggctcatcaggctacattggcgactctatacaaaaaggttattatagccttaaaaaatttataggaaaccttcggaaaagggatagcagagcgaccaatgacatactaaacataagattctattaaatgcaaccacaaatatatcgaggctctgtaagaaatagggatcgactagaaaataaataattacgcttagcgtttctgcgttacttctatacgatttttctaataagggaatagtaggtctgccattattcaattgatcttcgaggacttgaaaaatcacccctctaatttaatatcctatatatagtatagtttgtatttaaggaatcgctagattacattttggtatattggtaggtaagtagtagagtactttatgccctgaatggacgcttatatgaagaatttgcttgttaggttgcttggaaacggctagtggacgatgtggtgatgaaattcgaagttaaaactgtagtaaacgttacctactatttctatcctgtggtagccttcgatctactaaataagttggttctgcagattgttagcaagtgttagggaagtatgcgcatttctaaaagattaaaaagagttttaggttcttaataaaggcttatatatatcgctgctttagagtcagggagctgggtaagcgcaacgtcactttgaataaaggcgaggataatttgtgctagatatatatagcaaaaagcaacagatctaaccatgaccttattgtttaatcctcatttaatccttaaagattgtttgaagactattgatgattatagcttctggtcttagagtataatcagcggtttattaggctgactaagtctaacgagttattagatcatggaaaatatgctctaggggtgtgtgtcttttaagtcccctaaactagtttcgacaaagcttaataagaaataaaagaaagtaaacggctaaatctatatctacgataagctgcgagtatggtcttttactatttctcttaataaatgtcaatgttctaggtggaagagaatttacagataatcgaaaatgctatttagataaatcaaagtatctatttatcgttatatcaaaggctataatatgttaaaacaaaaatcttccaatatttgatgtcgtgaaagtataattaacctaacccagaagtggatggatttatttattataagacccgcatctgatggaatcatgaaataatatcattaaggaccttcggtatttatattagctctagtaagattgtaaggtctggtcggaatggtcagtctgtacttacattagatctaagaataatacgttgctctacgatatttagcaatgtgctacgtatatctaattaggtaattagtgactgtacctgtagagccaaagatatataaacataggctaatcccgcctgcttagcctatagatagctcttattctctagatttagtaatattgtctatatacttgagtattaatatttttaattattaccacctccgttcgaatacttgtcggctactaggtactattgaacactgtaattgcggaaatatttactgtggctaatactagcgagctactcctaggtacaaactgtgcgcttatacacgtaggtgagactattattagttttttgattgccagcattggtataaagaagaatgtatcttaaggtaagctccttaaagaaggaagatacctagtctaataacttgaagatatcgtggtaagcttgatggcttaagccaaggacgtgacctatcaggcatttatagtaaggcaatccggtatcggagctttattagaataagtctttctaagtagagaatttactattttatagctcttattagcccttaactctctagttagagctgtgtggtaagtaatataaaacttagaagacgtagtaagggctattatgcttttagagtgcgtatatctgtatagaactaatgatttaactaactagccaaaaccctaacagaattgtcaacacaaatcgagatggcttggatttaatagccggtttcgaaaaacaactttgtactaggtcttacttgtctattctactcgatatagaaataagggagtttaatatagcggccgagggcaataagatctacaatatatcttcattctattatacgtttaaaggaattgaaagagtgatagagcctatatacgatggtggcatatccttctaggtatcgtgcttattatttggaaatcctaggggtatattattaccgtctataactatcgtggaatatgattagttagtggatctaggaaggtttcccgaagtagtatagcttaagacactctctgtaggctttcctacctttacctgtgaactttctataggctgtagctttaccacacttgaagattccttgttacccagtgtttccgctcgactacctataaaacctcaagtcaccgttactagccctaaagtaaagattacgaacgcctaaataggagaaaatagctagaagctatcaattctatataaaacgaagaaatgcagataaagtggattacttcctctataagatactttcttttggaaagagattaaactgagactctaagctttggttaattcttcgaagcctttaatcaatagactatttactattttagtataggtagccagtgccagctcgattgtgtcactttaggaagctcttcgctccttataggttattgcagagaagttgtaatcggaacggtatgtacgtgatttgtctagtagtatcaggctctaagttattgaagatttataaggaactattcgccactctaatatattagaactacactatacggtctatctataccgtagctgcggtggtagtgtataatccccctataccgacattattatcgttaatagggactaactcgggtcttaactaaaaaagaaaggaaacctagtgaaaaacaaagaagctgaaatcatagacttaataatagaaagaattttcctatgcccacgggatttagaataaaacgtatataaataacgaaaagtatcagatttacgaagacttggatagaggctatagctcttaatcgatcagttcggctataggattatcgggctgttatcttattatagcagctgtgatggtcctaggccaaaaatttctatgaatatatatatctccctgctttaatgattactaagaaagataagtgttaataaatacaggatacttaccctaagcatcgagatcttccgagaattcattaatatacttaaagcttcctaggggtagaatcttcgtagaatgagtgacatcgtgattctaatcatttattacctagtctttaaagataaataccaagccgtaccgttccctatagaggatatagataccgatagtattctctaagaacctaaatggtctaaaaagctatttagtatcttctcttagtttattagagtaaaatggaactaaaaaagcttattttattgtgataaatatatttcgagtcgagggataatcaaaaaccaaaacgattgatcattttttattttttttattttttcaatcatctgttagataaagtctctagataagcaatcactaggcgggataggccagggagttttaaagctaaaaatacgcttaactgattattgggctatatattcgcctaactgcgatcaaataacaagcaaatgtatatagggtggattagaaacaaatcctaaactctgctttcttagtacaaatggacggactaacgaattatacttaaagacttcatataccacgctataatataagcagtctggtattaagtataagcagtctatcaatcgtttttagctgtataaataagctaaaaaggtagattagctgtgggaaagagttaagacttcccgtataatcgctgataagatagtcttacaaaaactataactagtatccctacgctaattattccctactttagccactatcaacaactgtcggtcgatagtcctagatatagtatggcgcaaagcccttagtgctctagaccccttatggcgtatcgaataggataaaccattttaccgcctcttttaagttattaacttcagctagcagtcaccacaggtaatttaatatctaactaataatagcctagtttttttagtaggaacctaatatatatcgcttgtagtaatacagaggatagagttaaaatattagcaaattctctgttgcagtttttcttatacatgatttctataatgatgctattcttatatattataccatacatttgacctactgagctaatggcttagcaggaagataaaagcttgctctatataggctactattatagagctatattcctattagctgcttatattaaatatgtatataccttgattctcttcctcaactatataagttttgaaaagtcggtgtatatatattggcgagtataaatcacactgattatagtggaggaaggtagttattcttcctatactctttacaagtaaattggcacaatgaataccataacaaacgtcactaaggctaagtaagtctgagctcttttcggtatttaggcactgcctgataagcttatatacgaagctttaacagccgctagcgttgatccaaatatcccagatggcttcaaaacgcttatacaaatcggaatatccttgattaatacttcgattgcgaaaattggtcataaggcgtctaagtctactaaaataaggggcatgttaaagaatcagagaagaagaaagccttctaatataatataggattgatatcagcggtatgggccaactataatactattaagagtcgagcctacattgcgtaagggaacggtattaataagttaattaaatacagcacgagtggacacagggctgagaatagtctcgcttcggccgttagcgcccttatagtagtgattgggatagggaccggtagtttagatctagtgttagatagtatgctgcggcttaggtgagttagcttaggccctttatctgaagtgtcattaattctgggacaggtttcttcgggaaggtaagggaaaaatgcttttagaagcttacgagattgccaccgcttaacctatagaagaagacttctaaaggcctagatatcttccaagtgttggcgacatctcactaatccaatcaaatccactatataaaactccacttccatctattctgtctcctgataacagggccattaatagcgttcgagttggtacggagcagatagttctaagctctacaccggatatcactatacctctatcactgacctttagcgataacctggaaacctaggctttgaatgatttagatatacgttctgtgaattattcttgaccctattctctagagggcgaggtcctataagcgataaacgtacctgtccctctagatttagaatatcccctttatagctcttataattgttccttaccgatagttcctatgaccgcttgcctcttattataagatctacctttatatattgaggaacactattaggtaggcctagagcctagcaactaaagtgaagcgattgtttaagttttaaaagagctatatatcagccaagtctctagaaaacggcacagcagtacctaactgagtaatagaccagagaagtgtgtagcgataagtctaaaaatcaagtatagtggctttctagagagggaaagctagaaatgtgaagtaaaagggcaccctttactgtatgaaatatatttctaaagatatatcgagtaaaggcttctaaccacactccgctcttcggacctattaggaaccattctcattcgcattactgatactggtgcttttatctgtctaaaaaatgccctgctaagctctaacttatccttaggagaaatagtattgcgacagatatctaagaaggaccgatacaaaattataaatcgtctcgataggaagtttgctcttaatattcttcttaaacgctaccacctaatagaactttttcgagactgtggagggctttaaagctgtacctctacaaacttggttttttatatagtcgaatccttcctacctaaggctcaaaaaaagggcaacctaaatcacaatgataatactatgattacagagagaatgataagggaggtctttccacaattatcgacagataatcctaagtataaacgaagatatagggcaataacgcgattacaaattattggacgacgatactaaaccctagtaaacaattttgggcagagtataatatacctcttacagccatacttattaataggagagctggacaaaggagtttcagataatatatatgtaccctgcgggattatacctataggtaactaatattttaaaggatctacgacttgaaggaggcggactttaaattgttagtcgaactcctagaggcctcttagggtaagctattacgcgatctttacataaaggcaaatccagtggtagaagagctaatatatggctattaaactcgagcttatagactacggttataagaagttgaaattgaagatatagtgataatccctaaaagatctcccgatctggaactgttacttagctctaaggattctatatataaatatagagtgatagtatgataaagagaagctgaactgcaatttaaggtttttataaactaaggagtatgagttacactatatgtatattaaggaaaaagattattgtccctagtttcctaaactgtttctaggtccgaatgggtaaaagattgttaatttcagctgagctggatcgatgtcaaatatactaggtctgtcaatagtcgattaaggaataagaatattttaataacattttgaatttattttacgataaaagtccgctgtctgcaaacgagttttataagtaacagatataatacgatttacccttctatttaaacctctgatatgactctgcgttaatataactataatataaaggaattttttaattcatatgttcgtcggtcgactatactctaactctaagtcgctatagtgtcaatctaaaaaagtgttaatatatagctcttctcttatgacttacaactgacaaaccgatctagttatgctacctaatccttatctgcttgagagtagtgtctagctttatatccctcacaaagctaacggttatagggacctttgctgtcataggatattagaggcctctctatatagattccgttctattacctgatccagtagacgatcctctcggcatataactagtctaataccggtcggcttagccagtggcaaaatttatagcgttagtagtataccctcgtattatatttctgccctagaaatagacgaatagtgatagcgatcatgttgctggaccatctacgagctctataagctcgattataatatataaagtggcctataacgtttgtatcacgtatattagttgaacttatattatcattattctcgtagaacttatagtaaagatctggttcaactagtaaacttgataccttattataaagatttttgtatatagaccatgtagctataggcttttgtttcttagccggaagcatttgtcgcgtataaagagttaaaaaaattaggaatatttttgctgtttagatataagatttactaaagctcgtagatagtagaaggagagtgtagatttatagtaataattagaatgcggtagttaactctagttctgactgtcgaagatgaagtatttgtataaggggagacagaaatatctcccaattgactattccaaagtaacgttaaaagcctataaatgaaagacctgccttgatatcaacctacttggtcattataaccttaaagtggacgtaatacctgcttttagaaagataaataccttaatcttagaaaacgctcttactagccctagaatcctttgcaataggtagagtgtaattagaattagtaaacgaatctataatatacgtacttttttttcggtacgtagggggtggtcgatccgctgatctatttcccgattgaattaaaatggaattctgtttaaaagactgaaaaaggcaaagcttgtattagaagatctctaatagccggttagtaactataagcgaatgtagtttcacgttaaataaaacgaccttgaatttttgaatagcaaatattcctccctagttctatagtaaggagactgcactctaggtctgatataatcaagacagcctgtagaaagaatgccccctgctatatactctggtatcgaggaggtaatatgtttggaaaggaataggcggtctagtggaatataaatatgtgtatctagtaggctgccccaatatttgttgaaacctaagctacttattctaataatattaactactctatctgtatctctaattcttagtatcactatgaccttaatataatttaagacagaggcgcttgaaggcttatatactcaagagcagttagatcttttggattctatcgataccctccgatcctaaggtattagccactatgtctcctttctatagatcattgtctgcagtgaccaatcttctggaaaaagctctgttcttaaagctatctccggtatctcttttccggtgaaaagtagtctctgtactagatttctaactgaattggttctgtggaagaattcgcaagtaggagtctgggtttctattatcccctattaatcctgtagcgacgcagagtagtattcgcttagcagcttttgtgaatcactcgatgattttaatagtcttacagagttgatagagaacgtaaaggtagtaataggaatctcgatctacagaaaagcgttttcgaatgaccttctgcgagttaaggtctctggcctagatcggctatatcttacaattgttaatcttctgggactaatctacttggaaacacagtagtagtcggtagccgatgtttagttagttcaagatgtggtctaattgtatatacaagagccccgaagtattatccttactatcgtctctgtaaagaatgactttataaaccagatcgttctacgtttagtgtgggatactaatctatctggaatcaggactctaggcgttatctctaagcctaatgtattggtgctaggatctgagagtgaagcttcgtttatatcgcttgctaagaatcaagaggtagagttctgtctaggatagtatgttttgaagaatatagactcggagaaaggtaagtcaagtctacttgaccgaaacgttcgggaatacgagtttttctcctaaggaatttggaaagagcttctgccgttacttataggtgtggactctctaagaacgcgtctgagcggtctacttcttagctagattgtaagcgaactccctagccttattaacgagatcaatgtaaaagtcaagtcttaccagttacagctgcagaaactcggcgacccttgggtaatagtatttgagcaaaggtcgtatcttttgcatataggtcaagctttccagtctcttgttaaagcagccgtagaaggcatatatagcgagcctttctttagggatgtaaaaatagatactggctgctaaaagcgaatctgagtagtcatttagaacttgaataagtaatttacgaagaagatctctctgtgcggctattcacgatatgtcatcacagacaaagatggacgattggtgtctaaatattaaatatcaattatatgagacgaatatatttagtatattgaaatacttcttaagaagataagaggttgagagttgcctggaatatataatcctatgatcgtcaaagatttgttttaagaacagtgtgccctatagggagatattacgtaaagctatattgatagggcttaggtagctgtaagggattttcttcaatatgtagtctgctatatggtagacggggctacctcgaaaaccatttttaataagatagttttactagctctgggaagcttacagtatgccctagaaaaagggagtagagagtttcttatatcgtattaacgaggctatctaattacttacaattactactttactaaaaccctgtaagatacttgagctaatcgccaaaatgaagcgttccgtaaggctttataatcatactttggggctgatatactttcgacctcctaccctgtgggatatactattaatctctggggcctttacaactcccttattcagaaaagcatactagatatgactcgatttacttcagaggaggcactggactgcatgcttatatactataaggtaagacgtgtgacctctatactgttctaaatatcctattaatctcgatactgctgagtataggttatactgaaacgttttgttaataatgtcgctactgaagtgatcgaaataaaactccttaccgttctaccagtactctttacacctattactgtatttgagatgcctgaagacttggtctctaagatcgcaggtgaatcggaagaaagctaaagcctgagggagcagttaaatagaaaattgtggattctgataaagggctctgatatataccggcgttttattagtataagaggacttggtaagggaaataaactcatattaggttatatatatactgatcggactattagatacgaacgataggcctaggtctagggcttaacaggactaggaagcactgtctaagggctcttgcagcttaatcgaactacttgtagaagctgttagtagtggctatgatttagaaagtgtagtcctattgtacagccctacgttattagaaccgactccgtaacccgagtataccatcgagtagcatactatagagccgacgccgctgtctataacctctgtttcaagtataagtggtaagaagaagaataagaaaggaaagactaaagttcaatcttctgtcgagtccctgcttaggtaccctgagtagggataaaaggaatttaaaacttaatctacaatcagtctaattaaatactagccgataagcgatatacgtgttagaggccggtggagcgtatatatttcactcgttttgatagaaaaggttgagctaaatgtcttatcccttctaatataaaatattttgatcttaaagtgagtaaagtgtggctctacagttcgggtccaatgaaaataacgtcgcacattttgcgacgctatcaattctgtatactgccaattgtaatagggtcaatgtccctcgaatatgactaaaatagaagaaatgcgactactattctgtatttacttagactctgattgacggaaggcgcttagacttaaaagccgataatacgtccctttaactttacttactgcttagggtttaactttgtaccgaagaaggggggtaatgtacagataattttgaaataagaattcttattagatatattggtttctaccgtttcagtaaacttagagctcaaaaatgtagacccttaagggtcatttaggtcggatcttgccagtagccctcttatccgaccgtataccactggtgttatagacttaacagtccaccgctttaataagcttagtttaatctatctcttctgttatgtatacttctatctaactaatctaaatacgtagtattataggacctgtatgtggctaaaacattgtaaagtaaatacgtgtattaagggcttgttaataagcggccataggctaactaacgctatacccgcctatagacaggtggaagtaagtcattgcgaatctataggcctcgtaggccgagtcgaggtcgattaatatccctagatgtaatacagaggttttcttaccatcttatctatataatagatatatcaatttattaattctatctcgtaagctatctctagtgccattctgattactcggtgaatttatatacagcccctacttcgattgagctggtcgaatgcaaaccctagactgccctccgttggttcaactatatataggtaatacatacgcttaagattagacctaccaggtatagaagtatttataaggaaccgctcgaaataccatttattagcttaattaaatattgtgatataatagactctgccttcttattcgaagtcattgcttcagtcggcgattgtaagtcacttaagcttactctactataggatggctatatcctagaaccatcctaagggtgaaagtggattcgtaataaagaaaactaactaagaatatccgatcggctcctatattcgggagtcactgtaacattataagtaatccccctgttagtaattacaatttatattataccctatatattaatatctagtactatatccgaactgccggtcgttgctttccagggtatagtacccgggtttatacaattaagcttactctactgccgatagaacgcagtaggatagctttaggtagtattgttatagactgaaacttacctttataaaggatatacttgaatagtgatatactaaatatcgtccagggtatggtaagtttgacaaatatatacttaatactaaaaggatagccgacgtatagtatatagaatccgacgagtctatagcaggagctacttgcgcgcgataggttagaaaataatatcaatagacagagatatacagctagcttaatgacctgcagtttcagtgatatccaaggcgtatacaactctatagatatctattagggttttatagaggaataggtgcttaggatctaaatctactaaatatctgttctaaaggagacatttctgataccgacttgatagctttatatatttcccattggtccgtttccgctcgtttatatatctcgaatacctaagcaatacagagtaggattagatgggatagtatcggacggtatttttggctctttagttagctcggctgtaccttggtataaacggccttatcttctcggttcgtagctagtaccgaaattagcctataggttagaaacgaagggagttttaccttaccttccccttatacgcggatttggactaataatatggctaacggcgaaggtagggctcccctactattaaataagacgaaacatcggtatttcccagtgcctataggaaatattcggctttaaaatatactagatactatctaagaataacgtggggccacctattagacgctactagtccaattcacaagggctattcgttcacaatattcgaataagatacacagtagtataagccattggaatttagggtatatatggcgtagacgcattagtatataacctaagtgaggtacagagtcgattgagagagaaaggcgaaggtaaaggcgattagaactttacattagcttatcatcgatactactaatggtcatttcggggtaatagagtataggatcacatcggtattagggagcccgagtagataatacacttgcacgcttcgacttaagtaacaggaatataacagtaccccctattatacgatccgattcagtaaggcttgaaccactaagacgagtggttataacttaccagtttataaagatcgcagaatttttacttagaacaagtcgattaattagctttatggttatatcttaccgataaagatcacttataatcgtcttcagtaatacagtcaccatttatactatattaatataatattatatctagttcgttatactctctagctgttacttcgaagaagccgcgccggatataccaggtaacttctgagccctaaaggcgcgcgacaaacctacctataataagaaattgtatagttgtaataggataagacctcgcgatatagacggcaaacatcctaccccactattatagtataaaggcggtacagtcgaagggggaagacacaatagagtacatgtcgtagtgacctaggtcttatcttagacctaggataaaaggactccttacaagtatatttcataggtggcgatgggctgctcctatctataatagtataaatattagtaatagtattcgtgttatagagcgcaaaatattgtataaataactagatatagtgtagtagaaggcacgataaatcacttaccttaataggaagaatggacgttttaagcttctatacagcgaatttcgcaatcggatattcgcaccctgttattagcccttttatttaagttatatactttacctagggtatgctgtatggtataaagtgataggataaggtctagtgtatcggctatagctttatatagaatactaatataggtactgtatcctcggggccactctggtacaatatcaatggttccactatcatacatttagcttatagaccggtaatataatatatgactcagatggtcgggtggctaaagctatagacgaagagatggtaaagagctgtagtccttacgcttatacgttatggtcgaatgtccttggttctattaaaattacatcgactttaggatcagtggaactccagaataggttaggctaagatttatatacctatagtgtagatagtagcctttttgccttaggaatatatataaaggcggtacactagattagtacagtcgactagatggaccttattagtagaaaatataactcgggggccggtagaatcttaacgaattctcttacttattaatttgactctaataattaatacgttgaccctagaaaccttaatagcaattctaggaggtaggtgtcccttgggaactctaatctagctcctagggctatatcctagtgttaagaaacaaggcgtgacattaattacccagtctttttaccgctaaaatatataacttttttgactaagcgttttgcttattaattatgtcagaccagtttgttaaatttgggccttagttagagaatcttactatcgtgaattttactaatacgctcaccataccttgatttctgtctaatacccttattatacgatatagacctaattagccccctatggagctagctataattgggataaggaaacgcagttattaaaccctaggttttgtcattatatatgacctttttagtagcctcttgcgatggtaggattagcttattacagtgtatacgtaacttttttcccgattatatatataaaggatatttcagaatagaaaaataaagaatgcttagtaataatagatatatattgccagagtgtttgaccaactaccatcttattaatttaagtgcaatcctaacttcccttcccctagaacttgctagtgttactatttttgttccttagatatatctaaatcattagctttatacgttattttacctattaattatctggcgtttataagagaagcccctagatatttttttttttattcgaactggttagtctagtactccgctggatttatagcagcagtaccttagactcaactatatagtctgagtctgatatagataatgccgttcgtctaagtaaagaaaatttcgatcgtatcctttccaaaagctataataaatggtcgtcctacctaataaatgcttataaaaccccttatctcctaccttcttctatcaatctaaaatcgcttctcgaaagaataccgtctttccttagatatggtctggtgcctaaagatactgaactaccctttacttgtattaaaagggaatcgagcaggggacagtttagtctcctaattactagacaatcaatctagactactttacgtaggcaatgttaccttaaaccgaaaataatagctttagatattctgctagctattcctaatctattaatagtagagatatcaaaatctgcccctctgtaagaatggcctggtattaatggtatctcgaaccatgacaagggaaattatattagcgttttgttccttatataggcttatatcctttctgcgcgataggtagaattactagaatatactttaggatactaatatagtagcaaattcacgcataaggctggtcagcttgcaataggtaccagatactataatataattgaaattgatattagatacgatattaaagctactaaagcagcttggtagagggctatattacactctggcggcggctgggaaataataatagattacaaaaaaaaaatatactacttaccttagtctattattctctctaataaagttaacgtagggatagtaggaggttatctaatctctaaggtaggaccgctgttatctagtactgctttagaatatctagctaggttttactcctgttaccgactctataggcagtgttccatagccctagttactgcgctttatatcctattacttagcggagattccatttcacttcctatcccaaaatcagccttacactatggactatcgtctctattataaaaatccttaaatctagtaaaggaatactctgaatatctttcctattatatgatactgagttataatacatagggtatacgatctttactttccagtaccttctttaacagaaagattaaatgtaaccttattagcgcctagcttaatcctatctttataataataaaccctttagtctagggcgagaagcctcttacactcgctaaggtccttatatatcggcagcctagattagctaacctttggctcagtataattgtagtaggactagtaaaccctataatacaaaatatctagatcgggcttatagccacagactttaatacagcggcttagataggaacgtaccaatcttttataactgtagaacctagtactaataacagttaaatgatctatagggaagacgagtgtcatttactatttattatagcctataatagatatactagaccccctatttatccgtagaaactgtttagagaaactcgacttcttgatactgaaattgtagtatagcaatataccgcttaccgctattactgtttaaagtataaaacctggaattagaatctagtaaatagagaaatgctcgaagactccagtatatctctgatagagtttcgtagggaattcctaataaagaaatataaggaaaactactacccaatataaaataacttaaacttgttttcctaggtagcttcggaggctgtaactcgcagaatttttagttagcttaggtctacagggtatctagtaaataaaaaacctttatatcagtattcctggatcgatattaaaagctccgacgacaacggtgatgatattaattcagatagtggtcaagaggatggttattaatcgtttattagttaatggcttagccgtataaactaaagtatttagatcatcagatcaatccactctttaaagccgttaggcctactagtagggtaagccttgtattttaagtaaatagcctatttcccagagattctatagtcgcctatttagcaaattttctattatttccgataacccgctgctttacatatgtatctattatatatatcattctagtagttatactttgcattcctataggagccagcttaattagaacttgctgttattacaataagggctattaaaggagacggctaaaagtactttttaattagtatcatccgatattatatctctctactttatatctattaattttactaacaattttggccctcgaaagatataatatatagtagatttatagaattgaatatatttaaagatatcgcgtactgaaatgtatattattatactaaaatctgtgcttaaaggtatatagtctacagtatagctgtctatatatccttctagtcgctaaacctaagtataaagacccgtatatccctacggccaattaacatatgtattttcctagtatcatatcataagcgctaaggtgatccgagtagtattagaataaatatagagtaggccagcgctataaaacagcctattatttataatcagaaagggatctgagctttagtatatatataaaatcaaattatagcctatctcagatataggtatggctagacactaggcgtactgctagtcataatgaaggatataggacgcgtctaagactaagataggtaaggataagctaggctgcaatttcctattaggtactaaagctcataatatagttactcctaaaatgaccgattatctataacatttaggtcattttatataccttaaatcatataattaacctaaactcaagagcggtattcagtttatcgtcccactcagcctaactttaattctaaataccataccccaagagcaccttccttataggctaaatactactaggtcacatctattttatatacttcgtatggttattagagtttagggttacctagcttaattctcttccaataaaatagatctcctaggtactcgtttaatatttcatagtacttactagataatcaggttttttacctatcggaattttcccgatagtaatttcgatagttaagagttagagcctctagataaagaggcttaataagaataagcaccttttttaagtggtctatagtactttatttatagcagcggcggaactcaagttaaacctatagtatataaatcacgcgggagggccgccttacgcacagtaacttgacaatttattatgtgacttcgtttccctttctcgtcctatatggtataagctagttattacctctaaaggggttctaggtattcgcagaagcatctgcgcccctcaaccctaagtaggctagagatagactttaataaccccgataatcctagactcctagcagttactatcctattaatatcttcctataattttatactatattaccgcctctaagagaagcgaactaacgtagtgctattatatctaatagattatatccaggatacacgtggtttctattagcgccaaggtattatagagtggtgaacttagtacctaccagacaggtaaggctactagttacagcaagcatataattaccgggattctacctaatctatagctttaatagtattaaataatagcctagagtgcagtctatatagataatcctataggtagctaaattatcactttatactttacatttagtattattattagtattacctatagggtccttttacctatctcttccttttctaatctcctattcggtaaataagagtcctacagggatatctaaaggttctatacaaactagacaaagagtatatataaggtaaggctagattatacaagtatgtattgtctaaacctatacggggtaatatataggacttatactgattaaatatctcgagggacttaatctaaatcttatttaccttagctattataatattactaactaagtaaagtaacaataggttctatttggatcgcagatatatctcgcctagagttgacagatattaagaagatccggccatctatcacgaatgtagagcatttgtcttcttataattagatcgaatcgtctagccctactattactatccctagctgcctacctctgtggtctctactctaaacccctaaaaaagtggctaaagactttaggctcatttatattgcttaaaacgcgtttcgctatcctgaaagtccgcttgaaccactttttcgcttactgtacactaaaaagcctttatataatatatatcaagttgacttaataactgatcgaaataacgtccgcaaacttctgtcgttcgttaatccaaatctctctagaaatggactagaacctttcactattaaaattaagaccacaagcaatacagcaatattttgccaggtagaaaccgaaatatatatatttatcgggccataccacttcagaggctatggtcacgagtttgagaaagcgttcataaatacctaagtatccggcagcactagatatcatcggattatctcctataacttaggcgatttgaaattcatagtacactacgagactgacgcttatattgaagaagctgcaaatcttcaatcttaaggtatgggttcggaaaataagaattttctgaatatgatggaaaatctatctctttcgcgacccgaaacttactctcgtcttattaccgagtccaaattagtggtttagaaaaaaggaaaatctgtcctaattaatttaacccttaagatcaaaacacaagtgtcctataagccgtttaatatctaagaagttcttccacagctataggtgttataaatacccaaccttatccatgcctaccacaatggtagtacatttagactgccggaggttaaagatgtcactcgtgagattgctgaataggaacgaaactatactaataacctttagagattggttgtattagtcaagggaatcattagagtagtaagagagaatggtaggaatactgtcataaaatataacggtcgaagtgacagccttacagttttaaagagagaagggagtaggatattacctgatgatctttatttgaaacttagcgacaaaataggttcgactaaagcggttaaatcaaattctcacaaaacaatactcgaaattagggatactttctataatattaatatctcgacgatactatatttatcagcctttgttagcttttaatatctttcccagccacaaaaaactgaattcatttatagtaatattgctttatttaacattgctctcaggggcttagaatcaggctatcggcaatattttcgctctttataaggcgatatcccttaatattacactctctgtgaaacatatgatttcctcggggttaacgtacttaccaggcagtcaattaataatatttttgctgatttaagggcctgtaaaaccgattataaactcgggtataagcgttattaagctgtaaggggcgataaatctcgagtataggacgcggcatttcgacttctatttctaataatatacagcgaattcagcgataaaaaaaaagatcctaccaaggtttacaacgccgtgctatttattgtctcgtatccaggtaccttcaaacagggcacgagaattgcaatacagtcggtctttgaggagcgctttgtcgtgtccgcgaagcaacgaagccaattggatcgtcggtaaaaggagaatactaccaactcgtcaggcgatgagaacacaacagaggatgaatctaataagccatacctttctaaccagtcttaggctaacaaaatttatgagaatggtttctttagctaggttgctaggtatctttggaagctatagtagtgtatctaggatttattttctaggtattaagtctaatgagcgggaggtcaaacgtaccttcaagtatgaattcttctgcagagttctcttctttttgtaccgatattagtagttttcgtatccaattatacctttatactcttacgacttaattctaggagaataaatccgacggtctcgtgactcttaattagatggttaataaagccactgtatttcagaccgctttctagactagtagtggtatcttacaatatattgtagttcagaggtatattaattgtgttttattctagagaaaaagatgaggttatatatacaacacggagcccagttgattataaatcaacttagttatctatatagacatttcggagctaattccgataaagcggcttgcttcctaatctgtaccagagtcttctttcgaacgtgacttgtcaatagcttcagctgcacattcgatttcgtatattatcgagggtctccacttaagataataatagatactatagtccattttaacagttattatcgcgatttagcacttctggttttaatttaggatcgcgatttatatagaaaaatctagactattcatggcaaacaacacagcgtatatattgctgggaaactatataagtacttatatgccgaaatcttatcccgatacttatattattaccagtaatattacactctcgcatataatagtttctagaataattaaatctatcagtagcactcacttaagtgctactagtccggtaagtcccgtggctatcggagactaaccagattaagggctcccagctaggtgcccctaagtcggttagcgctcttcgcaggtaataagattctttacgtgatcagaggacagatagatcggttagctgttattagttacagccctgtatttaattggcgactaaggcctctagtcccacgcagtgtggtctctagtatgacagaccctgtcggacgagtgagggccatgccctccgttccccagctaatccaaatcggctttatatatacagcgggccgccgtttaagataattaattaacccatctattcctcctcttctaccgtttttctatctctcatagaaacataatctaatctctttatcctaaataatgaccgaagacacgatcgccgttacttgaatatttccttatttttatttcagttcggtcttttcttactacaggaggatcttgatatccgttaccactatttgtagtaataccaatttaaattaatcttctatttttagtcctaggagctggctggggtttagcgtgaccatagtaccacagagtaccgtggagttctcgggcagtcgaatatacaacaaatttcaatgagtatatatttttcggtctctcagtatacagttgtggaagaaaatattacctaggtacataagcccttaaatcgactagcccagggctccctacttcacttttgagttggttgtatctataaaaggtagccatgaaaggtagccattttggataggcttattagcagaaggcactctagacaaagagaataccattgacgttagatatataattaagggactcttattctagtggcctactttaagttaggaggttcattaaagatcttcttatatatctcagtaagaatgcgagtatcggcgcgaaaggttggagatatgttttcgctttaaataagaaagcctatagtgcggacgaggaggcgcttaagttactctagctcgataagctcctttagacctaatataaaacttgcagatagaacgagtatattgccgaattgcctataaagaaaacatataagtctttcctctatattcgtgatttttaagactagggccagaggatcccttacatataggcagtcccgaagatattggtaacgaccaaccgatatcctcctactctatcaaatgcctccgtgctcttaatagccgaactaatgcagatatagtatatagattttagcttcttcggcagctcatgtaatcggaccttaggtggctgctagttagtagagattacagccggcgtagagcctatatcactcgatatactcggagcgcgagcggagctgtgtagtatagaggggggtaattgttggaatacaggtgattccattaaattctggctaattggaccggcgcgagtacctatatggccgtagtgcagtatataatagagaaggggtcggtagataatataccgggtactataatacttagcacacatacaggcagcgttgatttcgtttactggcggatcactttcgtcctattacatactattaggtagactttcacgctagcggtcgaggtttaggctaagagcttcttaaacggtaaacgaccattgtatctagtcttacttttcaaccttatataagtctgtatatactcgatttaagattttgcgtagatggatttgggtagaataaaacagtattattatcgtctctggtacagtgagattatttggtagaaacatcgtctattttcctttcggaataggtatctaaccttccgaacgggagatattactcgctggaatatcgagctctacaagaaggtcactctccaattgcagataggtctagtacacaaaattgtacaagtccttcatagctcccttattaagttgcctataccgcttagttcttataagaatctagtaagccctcaatgcctaagaaatctaactgtggctctggaaagggtaggccaactggcctatataaagtccagcaagtaagccgcactgaatatattctagcttatttctaccctgcagatggcctagtattacagttatatatctatagagagttaatctagggatagcctagtagttccttgtattcccttatttatcctgtgtatttgtgatatctctccttaataagccttctatatgattgttggatgaactgtttaggaaagcttggccgataggctgggctggtacactatagagaggattcgaaagcgacgtctgtacggccgctaagccagagtttacagagggaagcataccattagtatccgtgacgtatatcgtaattgcaggcagcggagaattgaatggtgccagcggagcagggatatattggttgaggtagtcaatcttcttatctataacaggcctagggagaggggcaggagcttcgcaaatggccccgagggctaggtatagcaggattaaggcagtgttaatgtttttaccgactcgtggccgtagcaggttggagacaggctctaataactcgccgcgcacactcaggttttcatttgactgcctctttttggctagaggcggactattacgagccggttgagcgtagctggaaacagagcttggtggtgagttattgactcgataatagctttcgataaagttatcgaccttaatcccaagttcaccttccataaggaatgggtagagcttgaacatatgcttgaagtagctatcatagtagcgcctagcagtcgtagcatccagatccaagtttccaaattcgtcgatgtcaatattgacgtgctgtcctgcaccgttcacaccgggttgagcacctttagactcgcaatccattggtaattgactgttatcggcagtgtatgagatctcgccttggccgtatatactgatgagactgtgctcttcttccaaccgcatgacatagtcctcatcatatctttcagggtgtatcagcctcttgattgacagccacattaatagcttgtgagctgcagtggtgtgctctactgggatggagagctctccctcggcctccttctaatgcgttcaattatgttctttctaaattcaaaagtgattcctgtgtggacgaggccgtgcctagtgatattgctatctacgcgaagaaaaattatctttataaatacatcatttccgttccgtgtaaagctgtcatgtggagaatgttcgtatcaaatagtgtatgcggcctttttcgcaaatgccggcaagtcagctcttcaaatccaagcttctggcggtacctggggtccacggctccaagctgttggccaaatttcgaaccgctcacatcctgggtctgaggcatcgctgctttgagaggtgagtcctgcctgatgactggtgatggtgggagggccggatgttcttgcacagtcggatgtgtatgtctaacctcttcagctaggttgaaacccacttgctcttgcatttgatcttgccattttgcaaaatgctcatcgatgcggttggctcgctcctccatgcgagtctctatctgggagagtcgatccaataccagctgagtagtcttctcttctttgtgcaacggcacctctttgtagacacagccaaggttgtttactttgcagtggctgcaacatggtcgtccctcgtcacactttgcttttcgagctcgacattgatcgcaagcctatatggttagagtgtacgtgggaaaatctcccgaaacaagccctccttctactagcttaacatacctgcgtagctcgatgtgccttcctttgaggtgctttaagcacctctctttcgtaagaaccctgactgtacccgacatggggcgtatcttttgccatttgggtaacacgaattgtggaatctgagacaggaggcagacttctcgaaacggataaatgttcagcgttgttgacccgatttaggagcgggtagcccatgtgagcgcgaaacccaggtgagccctcgtacggcgcgccctttgttgactgttggaagttttggtaaggaactggaacttgggcagaatctgtgggcgcaggtataggtaggccatgttcattcagtcgaccatacatgctttctgatggaacttcacggttacgcataaaggggtatcttggtcgctgcagcggactcataggcgcatggtgcccttccggagaggaaatgcgatccattgcaaatggagagtccaggtgtgtggaggtgtttgaagctgccaggtacggccgttttgttgtattgttgcaactaaccagggcccttgacatggggtatgtcttgggcgtttactgttgcgaattaatctctcttcgtaaattgggactcaaaccgacgtgacacttttggttggaatcagaaaagatatagtcaatgagaggaaatcagtggattagttgtgggtgtaaactcggcaggagtctctttcctgaccaggtggtccgaggcttccttcctcacatccttggctacactggctgggctttactactggtgggtgccatccctggctgcttagccaattaccatacccgtaggtacgggggttgatcccgctatatgaaccgcacattctccatccacactttatttgctgcacaagctcgcaacaattgtcaatgtgacaggttgaaatatgaactggtagcttgctatggagcgggggatcctagctttgagggcgtgcccggtagggcatggtttaaattttgtaccacccttagtgaccatgaaatcgaccaagaatagttgataataagcggcgaagccgagaatcaaccccaaaaagacatttccagttcttaaccaaagtcactttaattccagtatggagaacaactcaaagcggaagtattgctatcgtggattggatgtaggtaaacgttttggcggtcgtgttgttttgggaacccatccccgggaggagggtataaaatctgaaccataccgtatagggaaatctcccaatgccagaatcacttgccccttttgtgagctacagattccagttcatcagttttacatgaccataattcattgagtgtttttcacgaatagcaatggaagggaaatccgggtttcctgggaagtatctaacggtggccaactaccattggacagcttggaggggattcgcttcatatcgagggtagtcctgtctgatccattgaacttgccgatcgtaacatatatttgactccgaaagttcatatcccttgtgatatcccctcccagaatgatcaacccgactggctccagcatccgcgttccattccgcaccattctcgaccatcccataacacagcaatactaacttgaggcccccaatcggatccacgggctcatacgtagaatccttcgcggagcttaaggctctgaattacatatattcactctttctgccgcagaaatattccaaaaactcgtccctactcatatcgccgttcacaaacttggcgcccgggctaatattgccgtagcctgcgcgaacgggggccttctcttctgcgccatcttgtgtatttcgatcctataaggatgagtaccttgatgggacaggtaaataatccgggaaacgttaacatacggtgccgacgccctcgtcgggcgattcaggtcccccaagaaccggtgtactgtccatctgcttcgcccgttctctaggtttgaacaccgtcgatgtatttctgtcgtttaaacttgatctgtcgtcgaaggtacaatgggatcgaacgtatggtggtgtggcctatgggccttgctattagaggtcacatttgtggaaagtattaattgtgagccgtggaagtacctgaattggttttgtccttatcgactgattaaccttagagactggataagaagactagcgatattacctctcagtaagtaactctacacgactgacaatgatagatctggcagggccatactctatgatcctgatttggtagcgattgcgcggtcccttccctaggttttggtgcctcccgatcggagtgttgattagtccgatgaggcaactctttctttaagtaagtgatagccataatatggatagtgctctctgaaacgagaatagtctgagtatttagcgctgataccgtttaacggaagaattatgaagaaggtggaggtgaaaggagaccagccccttttggatctagtttagcactataataatccaccggtgtgacgtaataacattgtcatgaaactttcagtaaatttactgggtgggcctatatggaaagagctagctgctggggcgtcaatatgaccgtcagcgtaaaagactcaggccgatgcctacgggccttccagctatcgggagccagtggccaataatggctaagccatcatgcgctcaccctaaataaacgaatgatggatctaacgaataaattgtatctatggtgcgattctaaacaagaaatgaggtggactcgggaaggtgaaagtaacaattttcctacctgtggcatttattgcgtatgctagactccaaccgtaagggtggtatacctaccgtttgtatgcacacagaaacagctactaaactggccaggtcatagtgggctaaggaggtgggtaaagagaaggttcagattaaaaactgaggtcggtctgggtcacatcggaataacgacgtgaggcaagagcgcctatcatgatctactagacccttgcaagcctggttcctagaatccttccgcgaggtaaatgtagccaatgcgtgctcaaagccataagccagatttgtgtcatgtataggaaaacagactaccccttgggatctgcgcgcgcattctgcccttaaggtagcaagcaaccttattcctacttattaagcctgctctatgaacctctataagggtaactcaaccttatgagctactgacattttaggttggttcgttattgtagcattatgtcttatgcgcgaaacccatttaatgtcactggcttcgtgttcacggaagtcccaataaactattccattggcccgacatataatccactaccttcggagataggttcaggaagttctctccatccgagcgttctacaatcggaaagctggttaataggatctgtgtcttcaaccgtgactccctctccccggtcaagttcgtcatatcgagaaataagacctcggccagcaccagcattgcctcaaccggaaaccaaaaatgaagagaagcaacgagtccggaggcctaccaaaaagacatgtcgaagggtatatgggcttactggcacgcctaaccaaccagcccggcgtaatgaaacgaggtctgcatggctggttccccgaacattcgtcacattggctaagtaggctctttcagcgcagcaaaaacaccggccatgacgagtcacgattcagccactcagccccagagctctcgctcatgcgattaccctccatataatcaagaaagccctccccaagcttccgtcgaggctctctagaaagccttgaaggcttaagtcttacactcactcagggttttgcgcaagattgctatggaccaccaagcacttaacctggtccctgagataatagatggttgggtggcggatattgaaggagttgatgcaaaaaatatcccaattgcatccagcatggcggcgcagatgtctgttccgttcgaacgatttaccattctcacgaaatgcatcacagctacgggcccgatgcaacagcttactatcaggcaccaggcaaccgagttgctgaaatatatattgacttatgcggaggagtactacttagtccagggttcacaggtctatcttgatattggtagatggatagaaagactcaccaagacaaacatgaggaagtgaaatgttattatccagagggtctggaatattccattgctctttctatggaattatgtgtaggatgttatcttcttcttgtaccagatcccttttcaatattatgggaatatgttctgtaatgtcacatatccgagagtcccagtgccgctatccccgtattagaccggtgaaagcttctgtcctttccctgagatgggtgtcaagggagtattccaatgttttaccgattgctcacctcggtacttccatcgtcctttgcgacacagaatgaatatcatcatgtccagctagtattattccagtgttatgggtgtcttgttggttccatcattgtggtcgctagctggttgggatgcacgggtgcgttgagaagtttcttgtaaaaccgatccctaaggcctcctctgggctttgggaactggagtataattgctccataggtgcatcattggtacctcttcatcatgtggcacacgggattggaccgattctttgacggaaagatcctgcaggaaaaacgtaaatcattagcctatggcttccactgcgaataatgattccgaggttcaacagagggtttgtgttactacctctatgaaaatcctgttattgcatccgtggctttttgaaacggccgcctcctgtttgtttgaccaaaatcgacagcggatagggaacaaatcttcgtctacaaaaagtcatcagcaagccctaaagttgtgcgactgggcctacaaccactgaatggatgtgggaaaggggaaggggaaaggggatgctggagggggaggcgcggtgaataggaagccgacatttcttgggcacatcttcgatctagacgggatgcttaatctattaacccacggtgagccatttgtcagtatttcattctcttgctgcacggtgaagatgcagtagcataagagtatctgagaagttgcgttgctcacttgcctgtgatattattcgtgcacggccgttgatgggaaatgtcaaaaagggctttcgattatgtatttgtctgcccgtataaacaaattagttcaatttcctctagttggatacctgttgttgagtcctgggtgcgaggcgtgagcttgaggagtgaagagatgaaccgctgactgtcagttttaggtaagtcagactcacctaggccacctactttccacccttcctagagcatccgaccatcctagccctgcttgcctcatgccaccattagtcctcctaccatcagatacaatccatccccggttgcaatgtcacttctgcacagtttctcttctgctatgctcaaacttactgaatcatccaacttccccccgactaaagctcttcgcacctgagtcggaaacgtcttagccatcaagatatgacatcttactccgaactttggctggactggtttggaatttatcgtttgattgcaatttgctggtccaaatgataattgtcaggcccatcgaactactgacctctcccatctatctcttagtcaaacgatcgcttgtctttgctcgaccaagatgccgtatagcacaagggtcagcacactaccccaatgttatatgcttcgaacaaagggatcctctacacgactggtgagatggtttggtgtgtcttgaaggcgctagtcagacctccggccagaagccctgcggctccagtgggagattgctcgcgcgcgttgctgatccaagataagttgaggtaagccccctctgtttaatctgtcacatatcgtaccatactctgactctatctcttctgctcaaaaggatgtcgctgaataccctcagctggaatctacgcctatccaatcttcaatcacggtctatgattcttgcccgcagaatatccataccccacaaagcccgttcctttatcctcctactgcgctgggtggtagagccactccgcgatgatacgactgaaaaatcgaaggggagggcgaagggctaaatcgccaacctctcgaaacacgtcattccagaggttgatcttccaaggtccaccgtggacttagctaactatggtactatgggagaagtaccctatcacacactgcacgaagatggtaacaaaagcattgacggggaagctgaagagtttattccatggctaaaccgagatttgggcagagccacagatatccgacatgttgctggtaagccagaaagcacattttctcatgtcgatattgtcaactccttcaaatgtgcatcccgaggcattcctctgacctgactgctttggttttcatatctctcttctccatatcaccatttgacttatgtgaccttgctgacggagttttagttaggcacttcatagctgtcagtccgggttaggccgatagctatcctgggttagggataaatgccataaattgaatactacccgactgtgcggctagatgatgcaattatctgccatatactgaaaactaggatatttcttcggaacgcaaaagacccgaagacagaatattgtgttcttatggtgagcggaaatcatcacaacaaggacaagtttcaatttgctacaacatctccctatgctgagctgactttgcatcctcacccacctcatgttcctgacgctagggccgaccatgaggtacacgcttcacacactctctcgtccagcaacgctatattccagaaaacttgacttcactatcaatcgattgatccccagtgtagattttctgtgacacattttattggcgccacgaagatctgccgcatttttgcacctctcaaggaagcgctcactggccgcagtgcgaggtacagtactgcagggataaggaattaggtggacacctggccatggtcctcacgctgggagctggttgtagtttggaacagccgaaatagcgactgttccaccgactcgccgcgctgtttaaactcgcgaatatgaggctggaggaacggaataccgggatgctgattgtagcgctggcggtatgaaacgaaattgtggctcgggtctatgagaggcaggattttgggcggtatcaaatgggcaggagtaacagtacgactggcggcgaaatcacggaatatattagatccgatcgcaatatatttgcgaaggccgtctagtatagccattagagaataatagttccgtgcttcataaagctcctgtgagaaaacaaattaagcttcagtttcttggtatgttcaatagttggagtcctcaccaatgtacaggcctgaaggtacggaactaggtgtggcagtccagagcagcattccaacacagaattgcttagcctttgccaatagatgagggcctccgaaagcatagcatcctcttctatatgtgttcctcgtgacagcccatcaaataaacacttatccgtctgcgtcaaggcccctgcgaaatcggtcgctgatgaagaaaggcagtcttccaacaaaggaagagaagtttcgaagggctcgaaccaattcatctggtcagagtgtctgtatgctttctggaaacgtacagcaaggacactgagaaccttgaatatagttgataggctggaggaatggtttttgaacagttgctgaattggggctgcgatgaatgcaaatcctggggtatcatgcgaaggcatatcgtgcttgccctctggctgaatggccatgatacactgggaaaaggcgtgatgtgcaaacggacttcgagcccgaagatgctatgtgaaccaattagctagtttcccttgatcttggtctttctttgtgggcttaatggatcacccaccttctctattttcagataaagcaaaagttcctccgggtacatgcgtagatgatctacaagaagagcatataacgaagtatgctgctgcaagaaccactctactgacacggctttgtatccaagagcggagcgtacgatatcctcaaaagcgatctgctggaaatgaaaataactctctgcctcaatttctagagcgattgatctggggtccgatgaaccccctgatatagtgggaatccagttccatgtaagtaatggacgttgcgggatactagatcgaagcaggatctcttccactttctgcagatgtggcaactctgataggcggcaatgatcgtacggctttgacgccgcaaagaggcattcattgatgaactgcatattacgactcagcagtgagcttcgcggagaagattcgtcgtggaatagcccaaatcggatcgcttgactgatatcattgaaatcgtaagcccatagcatattgattgcctcatcttcccaccatcgatatgcgacgcaaaattgaggaatcgccacactaggacgaaagacaaacgggaatggccccatatccacgggaggagcgctgcttgttgggttttgcatcatttgagacaaagtcggcagcactgagttggtgatatcctggaggtgggggatatgtcggcagacccaggacagagagagttccatccatctatctaaattttaatttaccgctagtcaccttctgtgtaggagtggtctgtatcggaaataccgtcgacgaccacacttgggcctggttgtagcgttttgacaatatggcgagacgggagggggacggggagttagccaaggcaaagcccacgccccaaagttagctagcatgccgtgttgaaccaatattccaaatagttgccctcatatctggttcccattagcacattggggatggtatgaaatctgaaccatacccgattgggaatatcctccaagccagaattcctccgccccttgcgacctttgatttttctcaagcaccataattccttgcatctgggtttcacgtattataatagaagggaaactcaagattgttggataggtattttgcccgcagcatgtcgagatctaggaccgatacgctttgcccgccccacgaggggtgttatcaagtgacttgcaggcctatgtgaaaaccgaaaatttgtaccaactgtgtgcctgtatctaaattgacaagtgggtttagtccgcgcctaaggaatgtaggatttcatgtggagttgatagggttgtgttattcctggtgtagaccatggagatgctggtgagaaaaacatggatattagggggctcaacggttagttactaaaaccaacgaatgggaaaagcggcccacgtattattatgttgagattgtcaaggcattcatgttgttgagcattttgggtcccactgttattgttataaggcctcttaaagtgaatatcttgacaccatttggatcataaggtagcctgtatttccgcacattttggaagcatagccattacgtcattcaacatgtcagggaatcattcatacaaagtcaacgttagtggcacgctcatgggaaataatggctgatttctctgcgggcggtcgattttgagataccctctgttattgtaaaagctctggggcagtggctacttcatcaacccagggaagatcttcgaaggtatccgcaaacatgaacactagacctggaatgcactttctttgtcctggattgaatatcgctacccagggcttaatcttggctaacgtggtgatcaacgcgcatgcaaattacgatgttgaagtatatcaaagcagccctcagggtgctgatggtcagtttggttaatttagatctcacttcctctagcgagggccatgacatatgcctccatgtggatcattcaagcggttcttctttttctagcttttaaaacacgtagacttccgcgagcatcatcacagctagcgctaggccgcttcctcagccatactttcccaaagcaccggggctagaaatttacacagtcatgcgaacatctccttttgaaagacctcgtaatggcgctaagtgggctccatttggctcgtaattggatgcaagcaggggttggtatgtgaccttgtaatattgaaccttgggttatgcactagactggttgcgttggaaaagacatgttctgtaggcggagcgaatgttcgggccaaagattcgaggtcgatccgggcaacatcggaacatccggtttaggcaaaagccctcctatcggatatccactggccccttacgagattgtcccccgatgtctcacttgcgatgggcacatttaataccgcattacaagccagaaggaagaatctatttcctgcgaaagaacacagataacgccttcgaattctttcgacgtgaaggcagaatataaactacttcctactcgtcaggtgtgttgcgtggaattgctcacaggtaaccaaactcttggcctacttggggaatcaagactctaaccaaacttatgattgcgacagtatgtaccatgacggaaactcatccagtgggagctcaacctacccactcgtgggagtcccaatagactacccgtatggcctgacacccgctccgttgatggactcggctcctgcagtagaccaagcgagtgatgtttgttggagctttgagcaagcacaaaactggacgataacacgtgcgtcgccaacagtcacactgtctcccctccctatttcgagatatcgagagataagacctcgaccgctgcacgaatcagcgtccactttgcctccggtgcagcctggcaaagaagaacagcacagccagtaccggaaattggggagaagaaagcactcgaagagccacagacagtcagatcaaggatacctcaagaagacagccaggagcgcgattcgaacggcatctgaggttacggatacgaccaagaagcaagtgagagttggcagaatgaggtatgtacggctgcactctctaactggtaacccgggaaatggctaagtcgcctattacagcagagcgaaacccccgaaagctccagggggagattcagccacacaaggcccacgccgtcggtcgcctgattgctcttcaaatcatccggaggatagcccccaagcttcagtaggggctcttcagagagccttgaaggcccaggtattacaatcactcgaggttttgcgtgagatcgccaaggagttccgcgccttcaacttggggcttgagacgattgatgactgggtggcagagatcaaggaagttgacgaaacattgatccccgtcccatcaagcaccgcggtcttacaggtacatgttcctttcgaaaagctaagctttatcctcacgaaatgtattacagcttcaggacgcatgcgagactttattgtcagggaccaggcactggagttgttgaaatatatacagacctatgcggaggagtatcacctgtttaaaaacctgcgggtccatcttgacattggtaggtatatagaaagactcagccaaggcaaagataatgagatgggcaaatgatgttgttctcccgggaggtcgcgcatagtcttttgctgtataccagtcattttctgcctaatttgcttcaaaattgagaagatctctctggagtgttcattgcatgtcacatactgaagatgcttaatgccgttctgtcagtaatgaagactctaccgcagccattctgctgttccagaccttcccaccacctgccttttgatgtacaggatacatatcgcgcagtccaacaactctaggcccaggagcatgcttgtatataattgctccgtcgtggctgcccgcaatctttgggaatgcggaggccttcaaccttgctttcgcatcccaaatactaccatgccgatgaacatgagtatacttgttgctcggtttcgttgttcgtatggtagagggtctgttaagccggtccgattcgctcacgtaaataacctgctagaattccaagaccattagctcgaggctttcactttaggtacgcactgagagactcgacagactggtttcgttatgtcttcattggacaggttccacctcatctggcgctcggtatagggccctcttgtgcacgtttggcaattgggtagaaagacatctcgtcgtgtacagataataagtccggcaaagcttggagatatgtaagaaatggcaagcaagactcggggaataataggaagagaacgtgccttgagagttttcactcaccgtcaatcaagaaaattcttgatttcctcctccacagcaagccttgtatcaggattatatttgctggctgtacaggcaagtcgtagtagcctaaaaggatcccagaagttcctcgcttgcataggatgtggtccgtggacggcagatgctgaatggtgctttctgttagcatgtggactcttcaaaggaacaaaaggtctcgatctgttagggttgtgataagttgttgaatactccagggaatgcgaggaaggaaggtcggggaaaggagaaatgtatcactgactgtctgttttaggtaaggcagatttgggtcctctgccctccaccttaccctgacgcgagcacctgagtattctggccttccttgtctccttccaccaccagttccccctaattagataaaatccatgcccgtgttacaatttcactttctctcggtatccttcccggtaagtgcgaactcaccgaatcctccaaacctgtacctaccaagggtcttcgggctcaagcctgaaggctacccacctcgatcctttgctaccaaacgttcctaaggctgattcgaatcgcaatctagtattgtactaccctagttcgaacaatagcaatcttcagaccgaccagactcctgcctcccccatccatccttccgtcacacgaacgtcgcgcatgattgctcgactttgttcgaccaaactcctgtataaggctagtttcagcacacgatatcaacataccgttctttacttctccaccaccggtgcggattattgcgtgagctctaagggctagtctgaccaggtcagaagcgcagcgaccgcggcgtaacaactctcgagcatttttgctttaaggtgagacgtcggaacaagctgtcgcatactggacactggttccatctcttcttatcaaaagacagtccctaaatacccttggccgaatgctacactagtcaaacctgccaggtgcgtatggccgtttatgagatgtcctcgcagcaaacgaccgctagtaacgacttcacacagggagacaatagacgataaacgctttaaacttgtctggagcctagggataattcgtcttcatgttaggcaaaaattacagacagtcttagattgtgataagaggtgggaaattcatacattcagtttccggaacaagctcaaacaattgagcttatattaatcgccggagtaacatatatatagggcattcagacacgactaagcccatcctctgtcctcttactcaatccgggtcacctgctcgttttgcgtacttgcctgtcatttggcagtggtttctcgatgacacaacggagaaactggaagaccctaacatcggctgccttgcaaacgccctattttgccggattttccttccatgacttaacaactctgatacggcaagattattgatgatacgaaggatggtctacattgcatatcatgcagaaaccatgttttctttcaacaatctggataatctatgctttgctgatactaaagacaatgacagcggaatcatgccactggatatggaacaagaatacgttaatgattttgatgctgaccgggagatcttgggaggcggctcctaattttggtacatatctggtgtcctgcagtctgctttaaagtatattagagcaacacagagacagctgcatgaacctttgtttcccataaagactacttccgtttcccagaaaattctcttaagaatgtttctgtatccatccctccgtgaacacaaaaggttcgtccagtgttggaattatggaagaccatcgtatcatccatagaacctgcacatccggtaatcaccatgcttgcgccatcaaaagtgcagtctttgaagatatacgtcctttgctttcttttattgatatcggttggttcctcacgagggaagacggtggctgatgcaagtcaatacccgagtcatattctcaaatgacgcatcatagatacctgagtgtctctgttcatcagaactggaatgacgatgactggatagctttccttcgtgcttgaatggttgcttgagtggaaaggaagaagggttagtaaaagctgctgtaagagcgaaggcactctcgcccgagctttagtttcagacttacctgatcccgaatacacttcatggatgtcgacattggctttctggtatcatcctgatagctttggggctggggcttgtagatctgttagaaacagtaatctctggaaaaggaaagcctagcgcaagggtatgataccaattctattctctccagatgtggccgggtagacccattgagccatgtcgaagtatcatctgaatcggggttgccttgagataatgcaccttgacagccgcctttcaaccatctgatggtcatcttggaagttggggctttccagaaatatcgtaaagaccccctggaatgagacaatgaagtgaagtcagaatgtgagggggaacggatcagccatgacctagacggtaaattacccctagtaatgtctacgtactgtatggcttggcactccatgccctaaatgatggtaatatttctccgtaggtatccagcgttggcacatatgccatacggctggccgtggaaagaagtgcggatgtatcaggttgagggagggccctgggaagatcagccactaaggccttttttatggtagcggtataattcagaccttgaccccgacatcagctgcgcctacctcggaccaagtacagtatcatagtttggttcacctactcttgcgtccaatggaaatgagagcatgagaggaagagtagttagaggaccacgctagtacaatggcccgagagtgagaagaagcgccacaaccctttccccaaacccctcgataaacctactcccaggaaaaatgcgacgatcatttctattactacccaccataaatatattgttcattatgaaagaagaacctgaggtggtgttgtccccaaatacttggggaagctcccgggtccatcggaaaacctgcactctggatcaaatgggtacttgaaatcaggtcacattcggtcaggagactacagtaacacaagctcatgtgcctcaccacattacatttcggataacccccagtggtggacgacatattctcgaggcttgctatcaaaaatacgacttcatctacaaagacctccgtcagcaacctttttggcagcaccacacgcgccctcccgctttcctccaacttcgcccctccaatatcacgcgaaatgacctgcacccaataaatacggacccactgcggaaggcgccgaggagacactgcactgcaatataagtcttggaaacgtcgaataagtgaaatgtcctggaagagccaacggctaccacaagtgcgaggtggtgattcaaagtcggcccagctaggggcggtgtcaacatggtcttttcagctagatccgggagagaagggcagtatttccgagttgcttggtatgtactgtaattctgacacaacgaccataatatcagctccatccttcagcaaaatacggattccgacctcgtctttagcagtcaagaaccttcctttgccgcttgaccattcccaccttcaagcaacctcgcaagtccggcgatgaatcgcgcgctccaaatgggccactgatgctgttgaagcgcttttttccctttggccaacccatcgccacgacgtgcagtcctccttttatttgcacaataaccagttcacatgtacgagtgcggccctgagttagcggtacgtaaatttcaacagaggcagtttatatttgtttcgccgcacatgttgaaatagcccaagttctgtagtcactgagcattgtatagggttacccggtgaatggccttcgatccatgaaaggcaaggcctcaaggttcagagatggattttggatcataagcgccaccgtgtcgccgtcattgtccgaatgaggaacgacagctcgaacagctgcggtcacgacatagtttgtatgaatgatataacacgaatcgctcccgaggcccagggttctcctaccactaatagctgatattaatataaggatccccatcactgccatgctatagcaccatgcaaaatcgctggataccaattatagcaatacttttccaggtaaagtgatctatagacatgaaccattagatctattgccttctcacgttagatgaagttggatgcgtatacaatatgagtatgaacgctatatattattgaacgagaagtctttagctctgttgcctcctcataaaccaaccattcatggcccaacactaggaatcctgcccagaattttcatcatatttggaccaagagcgcattgtgttcaaatctttgagccattcttgcctgaggatcacgtgtttgtgccagataaacagctttttctcttccttggatattgtgcgggatggggacattgtttccttgcactaatgagcggaagaaaaatcttgcatatccgaaattgaaagctgcttttggttctgcgaatttgaactcttagatcgactatgttcctagaaaagggactcgtcactcactggtgagtaaactttgatcactgttggagggctgaacggtaaatcgcctgagggagaggtgaaaagcagcccacgcagtacgattaccagggcgttcaaatctgttcagaatgttgaggattttggggactcttattgtacggtctctgatgttccgtagacacgatttgcattagaaccatcataaaggtgcccggtatcgacgcacttttgtgcattctaccctctcgcatcattgattatctcagggctatatagccaacgcaaaattcttcatgcaatattgccgctccctgcacgctcatggccaactgtccaataaagttgcaagccgccccgcttatacatgctccttgagaaattgcccagctttagccggcagtatgttccaagaacgtgacaaacatctcctcctactttcgccggctcagcctttgccgcagcttgaccagcatgatggcccaagtctcccaaaggtcaacccgctgaccccacctgccactcctgtccctaattgggactcacgagtccttccaagctggcccgacgcgggtcacggcatatggatgcccaataaacgcgatactacatctctagaacgcgaataccgggtagaccatggggtaatccaggcctaccactgtttcccaggttctcattaccatgcaccaatgccgctaagggaccatggcatgcccagtctctgtctctctcaaaaaacagacggttcacttgagtcgacctccataccttacttgccaacattggtaccctgccacttgagacaaatcgactcatccccaatgtccaatgtagttgaacgtgcgccgggggctggttcctcgacaatgcaaactgtcaaccctgcgttggtatttccagcttcggcaactgcttctgagaccttggatattacatcaagtctccccgcggcccccgaagttgggcccataccctcgggtaccggtatcgtctctacttggattcttgaccagccacaagagaagtcccaggtactccatggcaccactatgtgtgtaaatgaccattcgcttcttgactgtcacgttaatagcaggcagcataatcacaacttgaaccttgagaaccagcaatctgatatgcacgagcggaggttcaaatgcaaaatcgttggctgcagaatgggcttcaagcgtgaggaccacctcgagcgtcacacaaggagtcacttgaaagaaaagccatatgtttgctgggtgcctggatgccaccgtaccttttcacgccgcgacaatctcaaagtccattgtacgaagacacatacgagacgcggtggtcgcaaccgttatgttgctaccctcgacgaggcgagccccgactacgatccagagttccgtggccagctgtcatttgatggacgcccactcaggttcttagctcctattagctctgttcctgaagctaagcctctgcaaccgtgaatttgggcgataataaacatcaaggacatattttgccgacaacaagtaggcgggactaggtggccaaagtaaaccaccgtcatccaagctcagctgcttacgatgcgactagggaagaacctgcggcgcaatgccctgtccccctgtcaacaatcaagtttctcgtccattgtttctgcctaccggagagctttgtcgtcaaacatgccgaatgtatacaactttaggaaacacaacgatagccccaatagtgcaaaggtggcacctaaataataccactgcccctgccattcctggattcgtcaatttgtagattatcttcgggcaaattactggtcaagggagtgcagctcgtttaaaactgtttgacaacatatccgaggctcgtcaataatcacacatagttgcaatctgctccgtactataaatcaaggtactcggttaaaattctgatactacgtttgactaggttgtcttccatgatttttcggccatggctgctatattacatgacacattcctccgctagcgacctctcacgagcatctttcgatatccatcagcatggccaaatcaccccgagaggattgattccagaccttgagcacgctgatcagcctttcttgagtctgctctaaagcttcttccaaggaaaccagacgagatagctgctcatcaggacgaagctggaaaccgtcccgctgtttgttcaatttagtggcagcttccttcggaggtctgtcattttcgtctggtatctcgctctcggagtgtttcggctcacatgaggcccatagacgtcggaagagtcccacgggtcgagccgcttggaaggcgagtttcgggtcatcgcgatcgagatctgccagtgtctccaatatgggttgaaaatgctcgatcgtcagaggtttctttaggatttcttcctgctgctgcgagagaatgtagtgattagccacagtatagaaagtgtcatcgcttagcttacaagtgggggttcggagtcggaaacggcctgcggataggcctcatcactctccctaggcatttcactcggctgacggtctgccctatcttggtccggtagttgttctgaggaatccatcctgttcacttgcaaaatctcagcgcccaaaaacatataattaccagctggcgctggtctctcttatagccttcccagaatcaaacagttagttcaacactgtgacaaaggtggctagctcgtccaacacaaccatgacccgacacatgacagagacctccttgaacatctattttcaacgttcggacttgatataaccgatttctttctttggtcgactttctatttttcattgtaccatctgctcaccattggacgaaacctgagggacaaagaaagaaaaaaaaaaaggaattcctccgcttattgtatggtgactgtagtgatattaagaaattctcgaggccattacctccccatagttttgcaactgttgaatatcaataacctccgaaagcttaccgctagtaaggggtattccggagatacgtaatcctttcccacagctcttcgcactatttcacccactcgtctactcagaaactgcctcttgcatttgggctgtaggctgtttcttggtgctgtggagtgtggtcgttgagtcaacgttagtgcatcaaccgtttacaataacgtcctttcttcaccgaatgtgtcgcttaagccagtggaaatataatccagacatatgtacaggcctcacatttgttagtcaccctcacaaatatgcttttacacttgacgcccactagaagcttgcaaatagcaagacaagcgggaaggtctataactacctcttttacctatgtttttgctcaagacaactgcatgactgatccgcagccagcagatattatatccaaggcgtcagaatgattttgtcccaagttgattaaccgcgggcatcttaatatagtgggaaggtgagaagatgaatattgtagaggttaaaaaaacgcggaacatatagtattaatcactggaatgtccgttatacattgtgctagtcgtgtctttgcaatctcgcatagtggagatagaccagaggaaacggcttgctcctgttgttttagggaagtacattactgaaggaagtaaaacaactgacaaaaagatgcacgctaacccatcttatataggtgacgtggaaagagaacgtccgcgattttgagacgttggtgttgtgatatgaggctggtgcagatcaggaagcaagccgcgccatcggaattagctccgaaatgtctatacagacaaacaagttgattgtaaatcaacttggctccgtgttgtatatataacctcatcttgccctctagaataaaacacgatttatacctctgaaccacaacagttggtccaccgcccgcctactcagatatccccacaacattccatatctcacatcaataatcaaatttcattcgtctctgcttgcggctaccgactaactctagcttgatgtaaatgtttagtgaaggcgggtaagagcagattccagcctgttctggaacgtgttgagcctcaacagctgcatgaagaaagcataccatgtgacttgaacatgtttgactaactagacgccgccttcggtaattttctgccggacccactttttgtggttggcattccctccaaccaccgcatcgtcactccgccaggatcgtctattatccaccaaggtctccccggacagccgggtggtctgctcaggaacagcatatgcagcgggcatggcagtcggtgtccgaccgggctcaaactctctttcaatattggagggttctgttggcgctgcgatcgtgtcggatgtgccattgatgaaagggtcaccgtccggccaccacttgcaggagggttctagatcaaggtcaatcaatcgccaatcaccactcgctctggaatggacgatgcggtgtactgctgcgcgtgtccatttgcttgcgcacactaatacctgttagcctggcaaaaccgaagtgcataaacgggagagcgctcatacccgaaaccgcggtcgttccgcctctaccatccattagacgtgccatctccttgccgatattgatgacatgaaaatggtatttcaggcgcgtgcaattgcggttgcggtaacgagtccggtccactggctgggtatctaggatatgtatagtgaattgcagaatctgctaccgagttagcccgacctattgtaggagcgatagcgagaagaaagatttactcacatcaaaaccccggtcatctcggtgtctatgctcgggacaatcgtttcggtcaaacatacggtcgagctcgaggatttgcgagatttcatcccccacccaatgggggtggtctattccggtaagcacaggacaccgcaaagcatccgagcataatgggggactcactgaaatgtttcagcctaacttgccacaggacttctagccttcgcacagtgtttctccggcttcggctttcttgaacgagatgtcgtatgaacggcaacgcgcggaagagtccaatgtcttcaagtacaaagacgatggtcccgtactggccaaggttaggtggatgcccatacggacccagcacgcataccggaaaatggatcgtcgagtacgtcgcatgatccgcggcttgtgcaatccttccagtcactcctggtcggggtcgggtcactatgcgtaatgtgcgagtggtctgtggtcctggcgcattctgcactgtgtccactgaagctacgtagaatgagggaagctgcaagaaagacctcacccctgagcgtggcatccagagctggacatactgccccggttgagcctcccaccccatgggaactgcaatatcaagccataaaagctggttgaaagaccgcgcgagtgcccgtctagaggtgatgcgccacgacctgtggtaccacatagtatgcagacatgtcccggcactccaggcacatccggcgcaaataccaccaagtaaaacccagcggtaggacgatacccggtcgatcaaatggtagaaaagggcgccggtggcgatcgaagcaagcatatagtggaccttgaggccgagttgcggccaccggcgaaggattgcagccaacgtccaaggcaagatcgagacgagactacatccggcctgttcattgttagccacttctagtcagacatactgcgtaggaatgggaaggctgccgtcctcagacccgcttcacgtaccagaagtgggatggcgagacgagctccgtggcttttatttcgagcatttgctcctaagacggacccatgaagaaggcaatgcagcacgcaaatgcgacctagccaccgatgggcccagtagaacgtgtcgcgttcgacatagtagacgtgggccggaagactgaagctaaacccggagcagaggggaacaaggtgtgtgaccgccaagcatccggctcgcctctgcacatccacccaggtctgagcatgaaggctgattacaatggtatttgcaattaccaaggctgtaagtactcccccttgcaagtatgttggtatatccagccactggagcacgcctggtgttggggcctggaagaaacttctccaggatacctgctgcaacctcaaaggcaaatgacggaatctgcgtccgaggctacaacatatccagcatacaagagcaaggagcccacatagaccgaatgtatcttggatggaagctctggcaagccactcggcaaactttgaaacagggcgtgacatgctttttaggacaggcaatactggacatcagcgggtttatatcttgttttctaaatggctgtttgaacaacgttgacctagagctttgattcaggcaggcgaaaatggcttgggagagcgatgcggcaaaaatgacactggtgagtaacgatcagaaacctcattttatgacttgggatggtgtggcaggttgatggctgaaatttatctttatcggcagcgtaacagtggtaatccgtctcatgtcgattgcaagacgtgcgtctcagaaaaaccacgttcggcgttgagccttaattctacggttcccatgttcctgcattatattacaattgtgagttcacatagttcgaacagttgaagttgatcaacattctgagaagcatctccacatggtgcatggtcgcttatataatagacggcgaccgtctttattagaaatatcgttgaggcaacctcgtgatacgctcttcaaactggtcacagttaggttagaagcgttccaggtcgtacttgccttacgctttctcaggcttccaacgtcaacgatctgtctctcaaccgtactgtttcctatcagggctttctacagagtaggtccgtttgaggtatcgaggaaagatgccaggtggagcgccgaataggtctattctcaagttttggtctatctgtgagagttgtcaagttataatcgagcaaagagtcacatatttatccacaaggtaaccacaagcaacaatgtatgattgaagacgaagaacccaactaggtacacgaataggcgtccttatatatccctgaattcttcctgtgtagatgagtagatagtagagtaatagatttgccttggcagattctactgatcaaccatctaccgttctaccacctgcatggtaacgtggtcggttgtcccaaagtggcagctgatggtactgtgatttccggcacaggtagtcgcatatgtatagaaaagcctctgctggtgggtgtcttagtcttgctcactgggcgtgatcatggtttctctttccctgaacatctggagttgccagactatagaatgttgcacgtgatcttctgagacatcaattggttggatcttggtggcccatcggtgtgggtgtgagtcacatctgattttggtgacgggtatgccaggaacacctcggccagcgacggcgaggaatgcgggaaatagtatacatacaagatagacccgctgttgactatcgtgttttcctggtttctcttctgctcttgggtacaagaattcttcaagtaaaacaaaaccgcgacactgttagacaatgtgaaactgtctcgtgaccctcaacctgtttgcggcaaacatgcgtttgagctgcatttcgaatcagcgtccaaagtagtctcaagtcgtcaaaggtacacacaacctcgcaaatccatattctatgactccttcggggtaaagtattgtactggtatagtgatattttgcgattacgtccggatccctctcgctaaatctagacctttgtgccgggatcactgatcctgtaagcctcaagagaccttgtaaccacgtaactgaatctctttggccccttccattatggactttcctcaggcgtgaactaactccagatgaggggagttggctaaagacctatcatccctggcattcctctggccctcctgtttcgaccacaagaaaagattgttgtcacaagttcgagattctaaaattcaattcccaattttggcaacgacaatgaatggcaagggaaaagaaaacaatcaaatcaaaccataaataccaacagctacgttgtgagccaccaaagccttctaacacgcatgccgactctaggagtgagtgatgggcttatgagaagaggtgacctgaacatgagaaacttcgaggagctcagtaaggatagccgctttctctctactcgacgtttcgagtctgaacgtgagctttgccctaacaagccaagattttccgctcattcgctccagcagatagtaaactgagtggttggtggaactatcagattcgcccgtggttatcttgaagtttgccgggtccactacggaatatatccagataaatccgttggagtgctcgaaagaagcggcactcgcgttccatttcgatatcagcgtgttgaataatggcccgaagattgtgactggaaggccaacacagacatatcccatctcgtcgagtctctctggacgcagagccttgagtatcaattctgcctcctcgatcgactttgaatcaataacaaccgagtctgatacccagaattcggttgaccagctactgaagtaaggtgggaccttctccaatacacaatcctggaagtgaaagaggcttgcccggaggccctttgcttgtttcctttttttcgtattggcaaggataatcttcaggtttcctgactgcgctgtctccagaattccgatctgatagttatgatgttccaggttagtcagctgtgcttgagggaagacttgaacaacactattctcgattgatatgaattcttctcggctgtctgctttgtttggtgggcggccttgcggaagcatggtggaagggagtctgatgttgatactctgaccacagagctttgactgttcccatttctaaacgagctcctcggtctttgaatatatgaaaggggcttttgtgaccgggtttttcgaggagaggcctacacgagagatatgctccctgctgcgttcagcatagttatacatggctattggaactcataatacgcacctattcgcacgccgccaatgcgacagaaacggatgttggagtagctgtaacatcaagtgcagtatcaaacaatctctcttaggaagagcttctggtagcaatccgggagtagcaatccaggggtactgattctcgtcgatgtgaatatgcagaaccagcgctaatttggtcgacttttggcaatgagatcaggttataaaactgtttcgggaggccttatatgggataacacccctcaaggaacaagtacaaagcaatttacccatggccagtcaagatcaatcgtttttctatcacaactttgatatgttcactggaacccaacggagtttccatttttaaaccctggtgaaaataataaaccgcaaacgttcacaaactatttaatatacgttagtatcgtgctggtcaaaagcctttcactcaacgttgagtaaaggctactgaaaataggtctttcatatggcgagagtcaaaatcgccgaggtgaacaggctcgaagatctagatcactttacctgatggacatgcagagaatttcgccattgggaggcttagttcaataagatttccatgacaatgtccgttgaaaccttaccaacttcgttgaaaatttactctgcttattaggagggtctgattatggctgaagcagaaagttacaaagctggcctgcttcagtgagatgcttctacactcagtttgcggttggatctcctaggatttgtaacttccttgcggataaagtggttgtttgactgggcggaagatgtagatgttgggactagcctgcctttgctagtggtagatccagaaacatgtaagcaatgagaagagacctactcagaactaacttccgagagttgatatacaaagcctaccggttatacgtactgtctcccgcgtatggcgatagggccaaatttggttggggaaaacactaaaatcataaggctttcggctaaaaagcgatgacattgcttcacacgcgttaatacagagacagcttactagctggcaaattaatgatgtgcacagcttgagtactatgtacgaatcatgtcttctctgccataccactcactgtggcctttcctgctcccaggaccgctataggaccaaatattgtataacaggactatcattctggtggataactcgtttggcaattgttcttatcggtattttgtggccaacctagggatgtcagctcatccattagaaacagtattcccatgcaacttacagggttagaaaagtcatcattatgtctgtggtggcagtgctgactatagtttgaagacttagaggatcggttcgagtagggtgattgatctctatccgacaccacgaatgcgcggtcttcacttgtttccgaaatatcttctttctctgagtgctcagagattgactcttgttcttcggattcactgggctcactgtacgaggatataatttcggaaagctcattttcttcttctatggccatcttaggtaggaaatgccggtgccagatgaatttacaacagaagatagacaaattttggattttcaattcaggtacgacccccatttatgtagcccgagggtcgattctaatatgccttgaacatgcctaaagagccatgcaaagttctaacgacaagcgaaagaatttagctagtgcttatgggtcaaattactaaaacgttgattcacctgaatacctaattgagccagtgatacgtcgggaatcgttgacgtcatcgactttcaccgcttaagatattcccccttcgtgtagcacaggctttatctatgacctgatgatcctgaagctagtgaggatatcaaaaattcaatagaacaatatatagtgatgctgtgagacatttttcaacgtttgcctactttgagacttaagaaccgctggtggttcagttacgggctatctgcattcttgaagacctttaaactcactatctcaaatccccttcggtggttcctcaatctggtcactgggattcatcgacttcaatactcagggcaaaaggacggacggattagtcaggaaaccacggtatataatttttgacgcgatgactgattcgtgggacgcagcggtcgccctaccataaaaagctggcaccagtctcgcttgctttggctgtgatcccatttattctggcggcgtcccccgctagctttatacccctcggcgcgatgtgttcgattgagactgccttatcatcctcgtcagtcccaatgtcgctgtcttcggtatgttatcaccgggagccagttaactgattctaacttaatttaccacttgaagctttttaatcgcccctcaggtatcgtaacgctggaagaccgacccagaagccccctagcaaaactcatacggtttgtaccgggccgctgagattgggtgctctacgactccgactaggagaaagaatttttatcgtggtggctggagaccgagtatggacaacagctgaccaaaaacggaaaatacaaattcagatggtcggctgagtctcgttccttaaaggtgtggaagcactttgactaggtggtagagcttagctctggccgacctaaggtagtttgtcggtcttgcctcacgccgcttaaccacccacatcatccatgtcataaatcctatggaacaagcacaatgggtaagcacttgaagtccaacttatgtcgcagaagcaaagaggaagtgtccgtttctgctgttaccctaggcccaattcaggagtctcgtgtaagcttctcgcccatgaggagcagatttactaaggcacagttcgaaggacaccttctgcggacaatcacgtccgcaaacctttcttttgaggtcacggaagaacccatattccgagaattgttggatctagtctattccggacctcaagctttggaggttccctcgttaaagaagctccgctattatatgcacgacatagtaactacctaccaagagttacagctgcaggacctgcccggagattccaaggtatcgattgctttgtgctgttggaaaggtccgtttgggcaggactttatggcgattactgcctattattttgataaagagtggagctaccgagaggtgctgcttgggttcgagctaatttgcaggtctgagacagggaatgacccctgtgatcaaatacttggactgatccaggaaaaagggttgctccatcggatattcagcgtgacagtcgactatagggtcgatgagaacctgatgctgttattaagagagaagctcacttcttctggtggtatcagctcttggcagtgctttgttggggttcctggtatagtacagaccatttagctctgccttcggcggtatatcgagaatatcacaagctccccagaaggggaaagggttgagaatgtgcgagaaatatcacacgccaatggttggaccgacctatcagatggcgacgaaatatcatatgttttgggaaaggtgaatgccctctatcctcttgactaaaaaacaaaatctgacccttgcctttcgcagattcgattatttgcaaaatttgtcaacgagacccctaggaagcgcgatgagtttttgtgtctctagcctgcatcgactcgagtcttgccgttagacgatgcgaggtcccgatggaattcggtattcctgatgttaaaacgagccggtagactgcgaagatatatcgactaatactgccaggagagtgggaatttacaatataaattaacaaatacggattggcgtaaggtcgactaccttgtgcaactgataatgccattcatccagtttactacggccctcctggcgtcgagagaggcgacagtctacagggtctgtttcgtgtttaagatactaatggagcatctcgacgagtcaacccgaatattgagaagaaaatcagcaccgtggaagcgcaaactatctgaggcgtcgcttatcatgaagatggaacttggagaagtatacgaaaagacatttcaaaactttggggttatgtatggccctggaactttcgttgctccccaatataaggtgtccgcattcgatgaggccacattatcgcaaggtttgggccaacccgagcgctacatcgagtatctgaggatctttcacctacaataccgaccgcaaatgcccacgagcttgtcttgcgtgaacggactgtcttgttccccgcaattgttggggcttgaccggcttctgtacccactagctggtctggcgggtagctcaaggtgtgcgcaagatgaagttgattaatatctccgcgaaggtctgaacaactgcccaatatttcctgttgactactgacacgtaataggggttctcaatatctcgctatgcgcttactggaaagaccatcaacgcgaatggcctgttctcactcgactggcgcgcgatctactctccattccggctataggagctggcacagaacggcttctcaccgttgcacaaaatatctgccgtacttgtggaggatctctggacgagtcgaccatgcgagatttggtgatgtacgcgtactcggagggatccgaatcagggaagcaatcgatcagccgggtgtaacgtgacatggcgagtgacgatgaatgggaggagttcgaagtagaggcagaaaggcctgaaccgatcagcgatgacgagtgggattcagccgagatgagtgttgacgagcgctctggggacgacgaaaacagctaggcagaggcagtgatactggagatcccacctacaggagacctggagtaggatgtaacggataaaggcgaggggggctcattcctgcctccgcctgtcacgcagctcatcaatagccttcgaagaagattctccggcagatgacagtgatctagcagggtgtgtcatcattcttatccagcatttgtttgctagaatccggcctagccctacctatccgcagtataaattcattgtcgttgatttgcaataaatcgttccaacgaagaatgcatcatattaatagattctgtggaaagcgcgtatataggacagtcaatgttacaattctcacctttggaactgccagtcttgttgcagcggtcataaaaatgtggttgcgacgagcggacgccctgcagcttgtaggtagtcagtgattacttgtaactctttctgtgttcacaactatctttatttgcttttaccatcatgtctgctagatatagagttggcagaattcgatcatcagattgaccctcacaggaaccctagcccaggaggcacttgattctaggtccttggcagtaacgagggctgggccccagccggcacatcaatcaaacttccaaaccaaataattgaggcgcaatatccattttgcccttcgtcgccatcctgccactggttattcgagggatcttgtcgttcctgcttcttctatgtggtttacaggcgtagcagaattccagtcattcaaaaggcagctgagatgaagaaacattggaattgacccgcgatatgtggcgggtgattaatgcagagggctctttccaagataaagtaccaggggatccaacatgatcagtttgattcggttgtgacaggaatcaaggtatggcgagcgtactggtaagatctacaatggtaaaattatctgactaaaaacaaaaatggtctgaatttaacaatctggtcagacataataattaaggaaaacacattgtagaaatgtcgcatgattcagtggcaaagacggtaattccaaaataacatctggtttcttgacacatagatttagtcaaaatttcgccaaaaaaaagaaaaaagaaaagcaaaagcaaaagaatcaagtctataacatctttaacgcggggattgatttccagctccttcactttcgcctcaaagttcttcctcaacctccacatcacccttgttcagcctctcctccttgtagtgatcgtaatttgccaaggctattctgtatctcttttctctctcggcttcgctcatggcgttccacttctccatcttttccacacttgccatgtaatcttgaacattaaattttttaggcgcctggttcttgcttagactgctcccactgctttcgacttcgacaacattcgatccaggagcgtcctaagtggcggaacgggacgggacaacagtacttgtctcctgctcttgctcttgtttgataccattagccatattgtctcctaagatgctagatcggctctttagggtcgatgaaaaagaccctaattgagccggtgtgcgagatctttctggcttgattttctccgcctcgaaggtatctaaagggaatggcaaatgtgaaaccagtttaccctccttttgtatcgccttaatgtacagagtctcctgcaagtcctagattgcgcggattccagtgctggccaccttcctgcccgacaaccgaatcacatccgtccgaggggtctagctgcattcgtcgactaataagtaccggtgcttttccttgatatccttccattcgacattgatccatatctgtggacacttaaggttgctctccgttttatcaatggcgatgcctctaaacccggcaatatttcttttcgtatattgccaatgtcgatccccgtttggcgcgttgtatctgagcagggaaatccgattgtgggacagattttcgaaaccttcggtactatacgcccttgttcttcgaaacacgtgcctgggggcctgggcgggaccaacccgaaaaatgaagaaccgacttttccctgtgccgccaaacccggctatgtcgcctggttggggatcttcgtggcgtcctttcttttcacgacggcattcatttatgttcaacttctcgaagtccacaaatagttgcgggccgacgcttgaatcattcattccacgtgtttgtgctcccgccgtgccatcagaggtcgactcgtcggtgagtttaggttcagcatccgacatttcctcgtccctcaccggggtctcatctgcaggccctgtttcatcgtgtgggtctccagaaatatcagaacgttgacttgagtttggttgatctggctgccccctgtcggcgggtggtcggtcatccacgggccccggtgcagcagcaccatgtttcccatcacttggaccctcttcattggagttttcctctttttttgcttctccaaggagattttccagcgtttcctggcgatgtctgggcgtcttgcgatcattattgggcgttttcttcacgccggcattggagaccataatgtggatcttctatgaggtcttttgtgaaaatttagcaagatgcaaattattcatgtttttacagaaatacatcgagatatttataagccgaaatcacagcggagtccaactatgttcccccgctgaaggaggtattctgcggcttgctccaagtgcctcaatatttttgggcttttttaggacttttttatgacatcacgagcctccttattctttggcgttgacacttgttttcaaaatggtagaattttgagtccagaagttgtgttccaggtttccgtagccaccgaaacctgaggcggcgttgacaacacaagaggcgaaagaaatcaaacctgcctacagtagttgaaggccagaggattgtttaattatcgcttcgccgtagatattgtgtactcttcaaagccggcacaaatatggacctaaacctggggctgaaagtcgaaatttgactgtttgctggtgctgctggatgatcatggatgccccagaatattttgacgttgacgtctctacatctgcaataattgagacatcaccataattcagcctgcggctggagcagtatttccaaattaatgctcatgctcgtgtggctcaatagagaagattggtaaagactgacgatctgctctgtgtaaatatccaccaaccttggttttacaacgacaacaaaagctgtccctggaaacaggcgagccacccaggaatcacatagggacaccgggaaccatacgtagcttgtaaggctactcattttcgctttcggggattcagtcatgtttctgggaacggctctgtgagtttggacgttcagaacttcattcgtatcaattctaagcttactccaagctctaaatcacggctatgctctctcttgctgatccctatgccgagtgcctggtcacgcgtatccacgcgtgattgacagtcccttcgctaatttctcactctcgtcacaccgcggtatactaagatcatagataacacagcacaaaaagttacatctctacgagcgaagcgggttgaaaaacccaaagagcggctggttttgatattcgaggcaattcgacttacgaagaatgctattgttccatcgttccaattccaattttcctggtacatacctgcactttctgacttccttgatcgctattgcagtgattggggattaaaggtgcagctggcttatatgtatatttatttttgcttgccgggtggtctcctcacccttcaggaaatcgttcaacacttctccgcacccgaaggttctttttcatggactgatagaattggagcttagcacgtttttaaatattgatccttggttacaaaactatacatactcgttcatttccaatgtgccagttattctataaaaagatagccaataaggtaataagaacgagtagcctctcactcgtacagctcctcctcatccgcaacagcacgcttgggcacttctcttctggctgtttcggtgagaaagtactctccggacgcggtgtccgattctatttcttcccacgcaatggtatcttcgtacctgctctgtagcaattgcgtggcgagctgcatcgtgacccaatccctggatggatggtgtcggagatcaaggtgcggtcggatagcgtttgtagatattgtattatatcgataatcaatttcctactaattgttgtgagggttgggggtctctttcgatacatgtttcagtcacattcttggggatgactctatctagggactcacatcctggccctaggagctatcttgttcctgggggcattggtgcgattcctgagagcacagatgcagcttctaggggtcggataggccccaggaaacccgacgtggcttctggggtcttgtacttccggctcagggaaccaaagtggtgttcctgttgactgcctcattaactcctggagcgtcaattgcggttcctagggctttatctcaaccttcggtaagagctctggtccgtgtatttcccagcggatacatagctcctacaagcgcttcgacgtttccagtgtcaatgcacctattgtcatagtcaaattcccaaggaagaaaatttgtcgaggcacccgaccacaagttttgatttttctgccaacaatcttggtcttcactcaacattggtccattgagctaaaaccgatgtctatattcttttggcctccttcattaggtatgacgaaaaggagaactcttatatactacactatttagagctatgaacctaaaatcaatcgaaattgcaaagcttttggggtgcactgacatctagtactttgaaagaggggcagtcgcgtggtgttctgatggtataaatatcagtatttcacatttggccgctaagcttgctctaaaacttcatatgaacggctacgctctctgttgctggtccgaatgcggagtgtctggtcacgtgtattcacggtgattgacagtcgcttcgctaatttcccatttcttcacgcgttgtctgtaaattgtaatcccccacgctgagtggaagtcagccgtgccgaccagcgaagcggtgcagaggtagaagggtctggcggtagatgagcccctgataatctggctgacgacggggcccaccagtgggagatggttcgcccccgccgtgtggacggaatgtgagtggctagcaagcgatagcgatatccttctacagctctgcaatgtgcaagcttcagtattgtgggagcgcaagcgagctcttgtaacggtgttgtgtcggccttgggagggagcgatcttcaagccgccgaggagcctgagggttggtaaagtctccatgtggtagagcgtttatgggcagaaagaatgattggattttccgctatatattcgtgtcatctcctaaggattagcgttaatattagataaggtccatactgctggtgaactttcgtcgggttggtgacggggacgaacggtgcacggctgttgattcattcaacccattcgacaacttagcatatggctgtaaattcccctagtttgtcctgattctttgtaataagggagaatagaataacttctcggcctccacctttccatccctcccagcccacgttaaatctttatacacttgggtatttcgtcttataacagaaatgaacgaactgaacaacaatggtctgtacccattgccttgataatatcttgcgctaacattactcgtctacgatttgcttcacgctatctggaatgaatcttttggcataccgacacctcctccttgtctcgctactgaccccaatgatctgtggcaggattttcttggcaaagacgatcctgcagaatacgaaactcaagggtcttcctttatcgaatgccttttctaccctgatctcgacagtctgtccgggttcaagtggacaggtccagatcctctgaccaactctactcgggctagcgacattttcctccacatgtcagcgctccttttccctaaagaggtgcactggatcgaatttcgatttgttcccatttgaccgagtatctgatgagactataggagaggatctgttctccctgccgcgggttgaaacggccatggcgaatctctatcggatacgcagacagctactagacacaatcacctggcatgctgtccgtgcaacaggcactagcttccgactgtccctttggcctcgtacggaatctctaccgtactcgagtctctcgacacattctctgttaactaggcttcccccgacgctatccctggacccacggtttttcgtacataatatatcgagtaattacgtgtgagattgatctgaatcaagcggggttgttcgtatactcatttcagtaaagaccacaataatgaataatgactatttgatgcccttcttgataaaaagcctcggaaatatataacctactttacatacagtgtgattccccttgcaatgcgtcgccgcttgtagtatttctacgtcgccaatataggacggggcagcccggaataggcaattcattactcttctcttataacgtctaacaaccctaccaaattgggactgtaggggtagttccagttatcgagtaggctgatcagtcgttcccgagatgattccaatgcctgtccgaaaaagcgcagtcgagctagctgcttatcgtggcgaagctgaagtccgtccctctcttttctcaggtatgtaccagcctccttcaagttctgattgctctgctctagcttctggccattaatatgcttagacacacacgactcccataggcgtcgatagggtccaataagtcgagctactagaaaggcaaatttgggatcgtcgcattcgaggtctgctagtaccttcaaggtgggttgaaacggctcggtcgccaaggtatgtcttgtttcttcttcgtgttgcgaaggggaagtctacgatggtcagccaaagcatctgaagccaaatggtgtcacttaccaatagagggacgtgatcagaaggttccacatcactgtccttattactaaggtttggtaattcacagggccgctattctcctttttcctggtctagcgagctgttcgaggcatcaatttttcccaggagaaagtcaaggtctgggcgatactagttccatcaggccttggtataatcttatagactatgagacgcagacagacggctatagactgagttttacgatccccacatcagtcaatcaacgcagtcagcttagaatttgcttttattttcagcgggcgcttggtagtaaatttgagaggaggagtatcaacgggttggccgggaaaactgatcaagcctgacgatgttaagggccagatatggacgcccattgacgtgagagatatctcaactagacgcctcttccactttcgttggaagcctgggaaacccggcaaacagcattgcagaataggtagttcggatagtaacgaagggaaaaatagaaaagaaaaaaaaaaaaaaaaaacaatttatcttcgaagtttgatggttatcactcaaattgagcgttgataacgtttggctaagcttcaacgggttgacgggtcatgctaccgtgacctcgctttctgcagtctaggcggacagacccacagctcaccacagaccaacataacactaaaacgaggctagaaacaaaggtacatgattcctagggatagaattgtaggagttttcggtgatccaacgttgagtcgctaatatatgaggtgactaggataagaaatatgtgaatacgtgcctgttattgcggattgaatatctcctacaaagcctcctttaagagggatgtgaaggatttaacagttagctaacgttacttgaccgactcagcgtccctttctctcagtactactcttactcgcctctctcgctaggcatctaaaggtattaagaatgtcgctgcaaatagttgcggtaaaagaagacgtaggtttcaacaggcctcaattaagaaatgtgtccttcaacacttctaaccaggtcggtaagtgacagaagccgaaaagcctataaatacgtcctctacccctacaatcgctctactatttattcacttgattctgtaaagtcgagcaggcttgtgtctgatgtactcgataagttctccctttgatcgagtactagaatttatactgtgctaacatttatagtatatattgtggaccagtaaaccagatagttcctatactgtaagagacgtggttctaagcattcactgccccatttacgctagccgataggagatatgggatttggattagctggtcaaggtatctatgcgaagaggtctctgctatagcgagctgatctactgtcgcggctctggttgaccatagatttgaagtgtaactgctcacactgtaggtatataggcttacaaatctttgaaactgtactgacctgaaagacgcgggacagccagatctatggacgttcgaacacaatgcactagagtaagggccactctttatccctggtcttaactatcagaaaatgtgagttatggaattccacgctggtttactggctaataattgacagtgaacctttaggagcttaccagagtggccctgataaccctgtactaccgtcagtgcaaagccatggcttacacactattcctagccccgtcgcttcgaataatgcagtatgtcctaggtggaagatcgtaaactaagatagcgagttaacaatagggtgcggaaatttaagtgcaagctttagtcgtatcgaagcttgaggcgtccgtccttcctgatagtgagttatcgcgtcttctgctgcgccggtccggttgaatatgctaagccttatgcctaaaatcacgataccactgataccttcacgctattataggagcactctatcattgagggtgaaatatactgtggcgagtggcctaattccgctagatcgaggataagaccaaggtggcggccgacaagcgtgctctatcgcgtcttccgccctcgtccctaccgccttcgcactgttgtggagttcctgaacctctggcatcgcgacacattcatctactatggaagtgcaatgtttatcgcgggtgggttcgtaacgcgtttactgtcttaacaaattgtcttgtgtaccctagcgcggcttttttgaagcgagtgcagattgcgataagcttgaatgcgacgtggcatggctggtgactacattgcagagagttgtaagtgatctagttgtgaagccgatatgaccattgtgcaaactgatcgttacgtctcaagcgtactttgggatttctatgaacaggtacgctacggcaactcgtctaactagattagcccttactgactcggatcgtacaacaggagaacaccctcatttctgtcacttaagtcgaataccacgcgaacaaatgtcttatctactcgagctcccctatataaatactgtcgcatgctctccatcccttctatatgactactatcgacaatgagtcacagaaggttcatatcgcgtacctcggcctctttctccctattgattctgtatatcgggtcattgttcgatttgtctacatgatataactcctaaactccgatcagcctatactactacccaaatcatacctatggctaagtatacaacctttcaaatacctttaagtggcgtaggctgctggtatcgaatgcgtgatcctcgttatcttcggatggcatttggtatctttccagaactagaaaaacgcacaggaatgttgatgttttatcttacttcctggcagataggcgtacctctgtagacaatcaggctgttagcacaagtccacctacaaggggaaggagaggcaaagtctccttattcttagcctataatttgacattggttatctcaggtataaacccagagggtaagatcggggcacacgcaagccaatgagagctcactacctaagaatcacctcgggcatacaggaagctgtatcataagggctgtcaaaagtattgtggtatacccggttggttcttatacacacatttcctatctaaaccgaagcactatctacaaagaccatttacccctaggtatcactgcagctgtaggttagtcaagtcgaccgcgcgtatcctttatccgttcatatcgtctcctaacatatcacgcacttgttaggaaatccggattccctacatccctatttcgatggtttttttgagaataaatcatatattcgtcgagcccgccgcgctgcggaggatacgtaggcatgttactgttcggctaggcggccactgtaaagactttggtgtccgaaacaatatcgaatcagaatgtttataggacctcttagactagcccctagatcctggagcaaactttccgccgtcaatcaacgcttatatagtggttgcttttggaagtatggccggattatctactacgactacgagcgaactagcactcctgcggggatatcacctaacggaaattcgtttcagacggcactgcttgaacccaatcgggtttcaattaggtttcaaccgtgtttcaaccgtgttcccttatcagcagaatatggttgattacattaacttaggacaccgcttcctaaaaggcaattgccgtcacttcgatccgggattggttaaaatatgatccgtcgttgccgaggtatagtaggagccaaccgggtattcttgattgcttacttatccaaatctctcagcaacatggttgtctctgcggtaaaattactttgattcttacgctctctaggatataagagctgaaatagggtaaggtcgagtgactcaattgccgcctcaagtgatggctttgacttcgcaaggcacaaagcctaccgtatggctaattttactcaagccattcgttcggcacctcatcacatgcttctacacgtgggtcttgggcgtattgcttgatcatagttgaaccagtggatctactgtcctatcggactgaggctgtatgcccactttaccgagtgatcagaatgggactagaaatggcttgcgaaatagaatcgacagtgattgatacatttatcatgtgggtgagatggcaagaaaatctccgtattacgtccgtgtgacattgatagacctcgctactgcctataaggcccatagatttgcactgagttactaccccctgcctataggcgggcgggcggttgaccgaagccccgtgtcatataatatgtccataggttgcttactaataagcactttggtcactgaaatttcataattttacaatgtttagccacatatgtatatatcctatagtactacgtattcaggttatttaagtagaaaaggatacaatggatgtgtccagctataaccaaccctagtaaaatcaatggaatatcgagtctaagtgaaattgaaagtatggtccgaaatgtatagaaattgtgatacgtctgcattgtgtataaatatatacatgaccacaaaacatgctgaacctacaaaaccacttacaatataatgcctaccagtcgcacaatataatgcctaccagcgcatcagtaaatttattattaacacgacatactagttatactacatactaggattcgcctttattatgatcaattatctgctatactagtggttattgtcacatgcttctacatgtgggtcttaggcgtattgcttggttatagttgaaccagtagatctactatcactatcggattgaggctgtatgtcaacttcaccgagtgatcagagtgggactagaattttcgcttacgagatagaatctatagtgattgatacatttatccatatgggtgagatggcatgaaaatctccgtactacatcggtgagacattgatagacctcgccatgggccatgaggcccatggattataggcgggcgggcggttgaccgtagccccgtgtcatttaatgggcctatgtgttgcttactaataagcacttcagtcacatgaaattttataattttataatgtttagccacgcacgtatatgtcctatagtagtccgtattcaggttatttgagtagaaaagtatacaatggagatgctcagctataacaaatcctagtaaaagcaatggactattgagtctaagtgaatgaaagtgtgatccgaaatgcatagaaattgtgatgcgtctgcattgcgcgtaaatatatacatgactacaaaacatgctgaacctacaaaaccactcacaatataatgcctaccagcgcatcagtaaatttattataaacacgacatactagttatactacatactaggattcgcctttattatgatcaattatctgctatactagtggttattgggggtaggtgacaagtgatagatttccaaaagttgaaccccctattcaggaaacttacataatctgagggtggcatggaccgatggcaaggcctagacgttgaccacctttttcaccgcccgaccattcaccaccacgctcatcactacgttcatcaccacaaacacacacatcaactcacacatcaacacaaatcaccactcacatcaccacacacatccatacgggaggcaccctgtcggcagtatgggctattggaaataatgccatttgcaaagttcatcattggagccccgataccacctcagaaagcgaaaccatcaaattcgttcaaaaaatggcaccccaggtacagtacgtcccgaaactggtgcaaccgcctacatttcgattgttccacaaatcctagttgccaagacacgctagtctatatcaagagtttttccggagtatccttgtcagcggggtacgtattatttggtgcgaatagtaacacggttcaacgcaacaagcattgcaagacgacactcatctctgtttgcctacatctgaatgaaagatgccaatttctattgtagcgaggaagctattggatcacaagctacttcagagtcaagtctcgacctgctttcaaaaacttgcgttcagtatggtgaaccactttttcgactgttgaaaagacagtgatactgcaaggatatgattctcacatatcattgaatttgcaattaaaccgctcaacgctatggcagactgactactctagccgttttgaccatggccactagccacggtcaccgtctctttcataaggattgaagtgcttcaacagatgccgcaataatgggttggaggctttgtgtacccgtggttggccataagacgtgcctcccattgatccctctacaatcccttttgcctagcctcgcgctaacggtactttctgcgttgctcgcaaccaactgatgttgcctccgctaatacttctgctacctgtcggtacagatactatgaatatactcccaaatccagggtattggttgttttccttgacggagaataaaaagtctagaccttattggaaagcccagaatagaaacccgactccagtttccaggacaatgaagtgagttatttcagctcccatggctcacgagctaggttttcgtgatcgccaccccctcgcaagattgcaacgctactatcacagtcatgagaccctggagaagaatagcacccgacgggccaatcaaacaccacgcgcgaatctagacagacgcaggtagggttccgcgatgcagatctcagcaacgacccacggaacagtagatcaatgaggttctatttgtggagagaaaatggaaacaattgcaaaggtctaggcacgatccacaagctcaaacttttcggccatcagtgtacgatggaacgggggattgttgcctaggtactgctggggcaggtgagtatttggaataacacgcaggctttggcgacagaatggtaggctacaatccgatccgtggttgtgttcacttggtcgtagtcattagaaagtaagtacccctgtcaagtgggaagcagaactttacctctctggtcagtagaacgttctagaagctatatatcttctcctgcaccaagctttccggtgatgattatactatactctcttcgagccagacaagtcctctccatacgctcaattctatcgccagtctagtaactctagtagatggcttatagaaataatgccagtggatcacatgagcttacgtaaatatctccagtttttgaactaaacccggaaaaccgattggttcccgggagtgggttctgtggaccggcccacctacagcacctaacctgtattccaagcaccctgcctatctcgagaatgacactgaatgcagtatcttctaataaaatattgtcctttcctaatatcctatatatgagcagaatgagaatttgttgatcctactccggatctcgtttttttgggctagcaatctataaagtaagtgtagcagaggctgtttagataagctttctatgaggatcattcgtgacagccgcatcctcccgcatcctctcaccgagggagtatttctatggcttatcgaactttattttccggggttcggcgatcgatcgacgatcccggctatgttctacgatctctggggaactaacttttgtcaaactataacctctgtactcccttactattatcgtaattctaaggaatggtgcttgtttatattttaataatatgtatatttatacatataacaatcatacagtagcttgattgctcagctgccatgtttgccattttccccgtttgtagcacatcaaacaacactaattcgttaaggtagttgctattgctacttcaagatcgcgatatagcgcagatactaacaaactgctggtagtatagatattccgctcatcagtatctcagcttcctagctgcacagacacgatgtatatagttccaaatctacgatgacgatcgtgattcttcacactataaagggcggagtaatggtatcgcgcggcctatgatatatgattagcttgtggttaaagggtggtaaacattagtttatacctggtctcgaacctttcctcttcattgattcaatgctgtcgatctagctagtcttagtggttaggattgtttaaatccatttttcaatattactttgcgtaggccttctgcttatgagattcgctaatgaagccttatagccggccgagcgataagctcctgctcggcttcgatggcttagatggcctggatgcttaagcggtctggtactaatacaacgttgcttgcgcagaatatagtacttttttccttgcagagactcagcgcttcagtctatctgatattgttcagaatatgcgtgggagcgggctttccacggcagcgcccgatgagcgtccagctaggcgagaaggttcttttcctcctattcctcccaggctacctcgcttcgaggggacatatcgcatgaactagtagtaaccagaatagaccttttcggacaatagcacgacttgagctcctgatagaagggaaaagtgaacctaaatcctctccacgtcctagtaaaaagataagtacccttggcccactgcaaatcttctaaaggttcaataacattacacatagaccattctgggggtcagttcggtgagtctgaattgtgaattattgattccgtattccaggctccctcaaaccgtcggtgttgaaataatccctagctataagaacacctaactgtcaatttcatactccttgaaattgttcttgaatgtaattactttacattaaaatgaacaaagcactgaattcccagactaagccctaccgggtactgaataatgtaaccctaaacagactttagaggcaaaacttggcttcgtacaaagttcgttcccctaaagtttaatgaattttatgactgattggttgaaatgtattccaaattaagcgataattgtggtaattacggatataagatagtgggccttgcaaaccctgatcgcaacctctggtttagagaacgacctcttcatattagcctgtgcgacttctcttgtaacatctggctgggagaattcattatctcaccttaacacagatctaactatagggagaatccggaaaatcccgttcactgatcaacgataaagctttcggagccaattataacatgcactgtccctatcatcctctgggtccgaggatatctagagtccgccaggatcagcggaaggcgataccacagaggaagagtcttctttacaggagaatggctcctttagtaaccaccaaaacgacattacagtggaggatggccaggaaagtcctctacactcctagagtataggcccgagaccagaagaaggattggaacaacccggataggctaatctcgcggaggactgtaatatgatcgccttacaatgtaccgcagagtgagtacgaatttgccccctataataatgttttgtgatacgtctgcttacaacattcagcctagatatccaaacgaagttagttatacgactcaccagagaacgaacgaaggctgactttcctaggctcatacaaaaagcattggataactctaacagctggattgcaactattcgcagtgacttagaggacatccgcagtcggttggcggtcgtagagacagctatagagatgatggccaaagaggggaagaatagtactacagaggataatgcaactaggcgaatacttcggtcgcagtagtaatctggatcgaaatatgatatggttgtagaatatatcccagagcctattgtcagccttattagctgaggtatcaccatcgcattgtacttcgcgaccaaccatatctcactggggcagactggaagctgtaaataaccgtaaggctacagaaagtagacaaatatttactataattgcgctgtaacgaactgagctccttggaacgaattctctgactccgccagtaacagttgtaaaccgattcgtgctattaaggtttctcgagcgcccgggtatcatttttatcggctaccctctccctggcccactagaccctcacgtccacattcagtggtagatcaatttgagatataaattggctgtcgtacgcttggtagagtattccaaatcttatattatgacccacggttagcccgctcaattgggtttcggccactttaggcggaccagaaaaatactgtagtttgtgccagcgtcgtaggctgtcgcttaaaatcctattatctgccaagtggcaagaaaagtatatgtgaaccaagcgccaaggaaacagccaaatttctttatgaatatcgccgagtcatattgcctatcaaatgctagggggagaccacggatatgattagttagattcggttgcttccgacagatcagcgtatcatctctccgggctgtgggccctaccgctaaccacatttagcgattatggaacattctctctgccctccaagctgcgcttggtagagcgagttaaatcgtcagaggatctacgtcaatatccttctatggcagaacaccgatcgatataatctttgttttctatatttactgttatcatgggacggtagtggcgttactgaagattatcttatgaactatccacctgctagtgcttgtataaactgactagctggttcctctatagtaaagctaggaccgctggacacgctaaatttgctatgctttatacaggtgattagtattggttgcttgaaactggcgcctcctgatttataagggtataattacccagagcggaaaactgaggcagggtattatgacctagagtcccaagcgggccgtcctgctcgggctaacttccgttaatgcctcccgagctaggtaagtaggatgccagtctatggttctggagggtatcgatcgtgttctagaaccgagtagtcgccgatactagctcgccatacgtttgatgtaagaccggctgaatatcgtgccatgagactaggccctgtatggtggcgtgagatgactcctacgcctgctgcagttgacagagctctcttttaagcctctggttctctcctaaggctttgtctcttgctgtgatagcctcctgtagtttcgaggtatcctgggctttttcagtatgcaaacgctgtatcgactgggaatcatgggctctttcttcgtctatctccttaagagccagctggacctccttttggatctggtccatcatatctaggcactttcggtgggtcgcttcatggtctttctttcgggtgcttttcgctgtagaatgcccctaaaagctagcgttagcaaggtgtagttataaacgactgataggataaagtaaaagaatataacgaagctggagtaagtgaaggaaaaatagagattaacataccagccctttgtgattccctaccgccttgagagggttacgttccgccttagacctagaggctgtggaccgagcagaataaggcgaaggggcatatgccctgccagtcccgggtttcgttgtggcagtaccgcggtctgcatctccccgagagggcttttggtcctttgccatgctgaatccttccgtctggtgaatgattgcaggtttagaaagacactgggcaaagcgaagaaatgattgatcgcagtggccttcggggagtctcgactttaaaagtttaggtggagacaatcaaaagccctgaaacaaggtgaacgcgtgacctcccccctgccaagcagctgtgtcggcatcagcatcatgagcctgaaagccaagtacccattgacacacaggggccccacggtgcgctagcgcaaaagcacaagatctgcgattttattgtgaagaaagtgatcgaccgccgcgcaccgggatctacgttgaggtatacggttgtgcctcagtattgaccagagccgaaccatccgagccgctcttggaaacaagaagggctctctggcctcagccatgtgtggtgtagttgtaccattgtcctagatgtaacttccactatatacactgtcccgctattgcaacaatttcggaaagttgggccctaaagacttccatttcattcggagaagaaaccaatccagaaatattagggcatgtattatgaaactagaatttggaatccaagttggaccaaccattgccactgtcgtgctaaattttccttcgtcaaagctcaccagggttccatagctgaccatgagacttctagatcgtgtggaaaaagccatagcaggaacctgggcttagtttccggggcaaccatttgaggcatttcaactaccaaggctcttgagctggggtactcgacgatcgccattttaccccgcgagattgcaacgctactatcacactctggtaagaccctgaacaaaggaagcacttgtaggaccaatcaaaaaccgcttgtgaatatggaccgatgatggtacggtcctgtgataaaaaaaactcggcgatgacccacgggacaatagatcaaggaggttctatttgtaatcaagagaagaaatagcaaattttttcaaaaaggtccagacacgattcacgaacccagtctcgacagaccagtaatgatgcaacatacctttgttgcttggtcctgctgaagggaccagcctcacaggtacggcagttgaggtatttggaatatcacgcaggtgtccagcaaaagaatggtacgctgaaagcaatccatggtcgggttctcctacctcctctcacaagaaaataacttggtcctccgtcgagtggcgacctgttggttctcgttagtctcgtcctttgaaggatgttcaagaaggtatgtaacttcttctgtactagcttccccaaagagtatacccacttcgaatgcgaaatctgcgctttctatgtgctcagattcgatcgccagtcttataaccctagcagacagtttataaacattcaacggatggatcagctgggattatataagcatatttttttgggttttgcctgaaaagccgagaaaccgattggctcacggaaatggcaaggtcccactccttttccagcatccggctcattctacccgtcctcagactctggagatcgagaatattttgaatacagtagtgctatttcataatattccaaaagactacgcccgtagtgagtatacctgattcttctgcattctcctataactattggtacaacctcaaccatgactgatctagaaagcaggtggagcagaactttattggtaaggtttctaatgagatcgataaatcctaagtatccatggataatttcatcctctcccgaggcagtgtttccatggttcctcgaaaatcatttgttaagattcaagataaggcgattagtcatgggccgacgatcccgccctcggttttgcagccatcatgaaactagccctatgacttgagaatggtaggaaagctttccttcacgtcaaaaataactgtggcatagattgaaaatcaattgtatgcctcagtcccaactacaaattactctggtttcgacatagctaacttacccgttagacccattcagaccactgggaatccagctaagcataattctcctaagacgataagagtccagacgtttttagagcttccaaggagccccctagctacgatgttatgatctcattgcgggggcagttttcggttcgagaggcttttataaaccaagctgttaatcgtttatcctctatacttctagccctctttgtacccgttaagccttattagaccatagatacactcatgaccagcctaccactaaatgttggggccattctcatagagaacatctccatcatctagatcgtatctatgttctctaccggcgcatacaatgccctagaaacagcgattatcacgttcgacttattcaagcgctaccggggcctctatttctagagtatgcaatttgcatcctagggaattctcgtatacgccattcctactatagctcgctttatttcttaggcgtccaacctcccgatatccatcccctttataataggatggtacactatggttaccggccaagctgtcgtcctctactcgcgtctgcacctcgttttctccgacatgagaaaggtgcggtgggttctatagatgatcattacaaacgcttgtatcctatatatactaataaccgtttttttcttcggccttaaccgcggcgatatacgctttgctcgttctaccgcgatatttgaccggatctaatcgacggttttttgcatataagacttcgttatctgtagtatatatatatatataaagcggtatatcatttcaagagtgctattataatccgcggtcgcgacagccgcaacgctattatctatctattttatattaacatcctcattataatcctaaacgtcttactattcctcgcggagtataagctacactacattcaagtaagctttaagacggtagtgtacagcgtcaagctgaagttggaattctctgtgctcaactgtctccggttgctgacaagtacgaacccctatatctgctagcatagacctaaggacagccgtcgattaaacgataagaatatttttagtatggcctctttataaccagttatcgcaccagatataagctcgcaatctagagcaacctaaaccgatataccacgttcgttacaactaagcagtatctatggatacaatgaaacgctacgcgagatatcgagcgagaatatgatactccctagagacgtttattcttcggcaacactatcagagggccacttaaatacccttccgggtagctcctcagaaaccctacctacactagaattgagcctatcgcaattcttgccaaagttcgacatctaagtattccacgagggagtactgctcgtttatttcggcttattaacagcagtgcggggatcttatacctttatcccagataggcataattccgtacaaccttgctagttagtaggtggcgacatccttactaaggcacttgattctaagactttttagacagtgtgattaatattgtgcctaagaggatgctattcttcgcttattaagcaaatgtcgtcaatgtcggtcggcgcgataggccactcgtaggaaggggtagaataggaaatacatatacagatcagtgatagagtatataagggatatattatcaaacaagtctcgtactatctatacgcaaattcgttatccaacgatatttactaagatacctttcggtttcaggccactggaggtaaacctaattaagcaaccaggccttgcattgaaatttgtacttggaacaatcatagaagctgagggaaggcttagtgtaaagtaaggcaattattatctaactaggcgagtggaaatcttgaactgtgatagagttttatttacctctaattcctaaagaatttacatttcggacaatgaatttatcgttagtcccttcagtagaagtaaatctttatatcctttaacgtgattaactaagtttgtaatacatttccgtagcatttgtaatagatataaataataaggttaatcgactctgactaatcttcggggtatagcgcagatattataatttataggatacgacggaagccctcggaggttaatcctatatataagtgataggggggaatgactttgtgagggacataagctgtaaggggcttggctaaacaatcaggataaccctataagggtacctaattgagggtaacacttgttgctagtatagaagatagagattcacggcttagactctgggtcgcttagagatatttgaataggtataggatgatagtacttctagaaattaatttagtacctttctaacgacgagatcgataatacagagaacttactaattaatattaggaaagaggctaatattttatatttaagaccagaacgaagatcttcccggatttctttatccgaagaacgaggtagatatcggcatcgtattccgagctatattcggaggcctttttaaaaagggactttcttctcctacgtgctttttgattcgctgcgtcggctggtttggttttaagtttaggttgaatatccatattaagattcttcgctggctctgaccgagagcggacaagaagtaggaggataaaatcaaggaggaattaagcgggcaattctaggattcgagtttgttcgtagtgacttaagacataaatagtggtctatagcgagcgccgcacttttgtgataggggaaatttaacacagggacagaatgttagcagcattagtcttcataggggatattggttggttaagtccatcgttgaattcgtgccagatcgtataaggagtggtaagtcgacccaacttacttaaacggggaactccattttctattcagatgtaaggacattttatcataataataggctcaccacttgttccggtcaatcggtagaatcacattagtctcgtctcgaaagccaaatttctacctgctgcggtatactttaagccaaaagaacagcacaactaggctacactatggtttcgtgatagactcatataaccgcggcagcctcaacagttcaagcgtccttgcattcatatacacttcggagatatataagcggcagcgaaacctagtataaccttcagctatatgataactaaccggtatttgatcacaggaggccatctccccttttactataatactcgtgacatagtgtctacttttgtaggcagttgcattttcgccgacctatgcgcacctgagaatgacctctcccgaaccctacggatctagtagaaagacacttgacaactcgccacttgctgcagatggtagtgactttccttacaagatatccccaggtaactttatcgttccgactgaagaggcgacttatcggactgggagcaataattccatcaagcttctaggcagcgccacccatggcggtgggtcctgccaggtgagcctcaccagtgatcgtgagccgacaaagaattcggaatggaaagttatcaagtcctacgaagggggatgccctgcaaaaggacccggaaatcttgatgggagtgccgagtcggaccattctctccaactccacttcgcgatccctgacggtattgcacccgggaaatacaccttggcctggacatggtttaatcgtatcggcaatcgagagatgtacatgaactgcgcacccatcactgtggctaatgagtcgccgtcaaattcgtcggacaacacacccaaacaatcgctggattttcctcctatgttcatcgccaacgtgaatggttgcattaccagagaaaatgtagacattcacttcccttggcctagaagtattgttgaatataacggcgacagcaaatatcgcccgcaagaaggcgaaccggtatgcaccggaaatcctacattcggcccaattcccattaccgatacagccgacaccggcgaggctagttccactactgaaaatgccaactcgatgccttgttcgtgtggctgccagggtagctaaacttgtataaatatcctgatgagcaatgtggtcctgcaccgcagagatatatagacgggagcgttcagacccatctagctcaatccagatcgtctgtgaagtggaaaattccagtctaataatattcacctctctttgttgattacaaacctggtttcagtattatagttccagcggggagcacatctgcgagataatgatagtattttgcccagcgggtatgattatgtgacgaactgagggagtggtcaaataccactaggacccttcgggactggcttattcatcgttcacccaattccccctagtatttgtacggtattccgggcacattcggaagtacggtgttgcaacacgccgaagcttatttgtatagacccctgagatcattcgaccgatctttaacacctacaatcaatcacctgattctattggacatgttcagtactagccagtacatcaattcctcatcctgacagtatataaaaatcacactctcaagtactcaattggctatgcccatactagtccgtactgtaacgaccacgttccgacacaacctcctggtttcagtgatcttatctgagtcatccgtccagtggcatccacataccataagctagtagataagaaaggacccacctatttggctcacgggattgactgcaaggacaacgcccagatggcgataatgaccagttcgacctatttagtgtcagcattattagtataacggtataacgtgggaatccgcgattacctccaatgcaatcatccacaatctctccaacataccaatgacagcaatcacaagcaaaagaagtgctattgcagagagataacacgagatacaccgcaacttagctcgaccagcagttgactgttaaaataaacaccaataccatacaactacacaaaggtaatccgctaagagaatatagaggctacccagataagcagatttcaaaaggaaggttccaacgtgagagactactattttcgccaaagctaaagccacagagaaagaagggcatataaaacgcagtaatcgaggtatgagtgggttttcgcgctgctggaagattatgcgaatgtacttcagcattattagctcaaaacgaagacactgtatataaccgagatagtattttgcccagcgggtatgattatgtgacgaactgagggagtggtcaaataccactaggacccttcgggactggcttattcatcgttcacccaattccccctagtatttgtacggtattccgggcacattcggaagtacggtgttgtaacacacgccgaagcttatttgtatagtcccctgagatcgttcaaccgatcttaagacctccaatcaatcatctggttctattggacatgttcagtactagccagtacatcaattcctcatcctgacatcatgtctcaaatccaaacagaagcaacgaactccttgtgttacatagaccctagttaaataggcgataaacgaatgcaaacgaatgcaaataaattgacaataccgatgggtcatataagtaagaactgattataacaataggtcgcaaattgagtgtagttaaggggctacactgagcctactatatttgttcgcttgaagagcgtttgcaaactaccaccgtcggaaccatgctccatctaccaatctgctgtacctggctttccttatgcaccaataataatatactgtctaaacagcacagatagaaaataggatcgcgggttccttctcgatttggtaggcctcaaaaaacagccaagcaaaagccaatgagtttgtccttcagcaacgagcatagtaagatttgataccgtgataggcagtcttattagctatactgaccaacaatttcaactctccctcgcatgaatctcaggtaaatatctcattctgtcacattagccgagaacataatgagacagcatgaacttacctgcaagatttcctcgacggagatactttccagttggcaaggtaagttctgaatctccgcttcctactcgtatatacgatttttcaacatcaatttcgtgataacatcggctagagcgtataatttcatcatcgcaggattcatttccgattctttaatttcgcagctattctcgacgcccactattgaaagtcagtttttatcaattttcgcaatatctatagatacctcactaatcttgatatcactagactgcgtaagtaggattgtttccgggcctagggtagcgagtactcgcctaagcccgcgcagatattagattccttctaatacctatcccatattaatttcaaatgcacctacaagagattttaactgacttaccggtttgacaattccaacgagttcgtcggtggtaatcgagtagctagaggctaaaatgtggctgactgatacctctgttagttcccagatcaacgtgtacgatacatcataataataacattcgagcaattttaggaagcttggatagatgacttgttccattagttctaggaaacctatagcgggagagaacggtttttcaagttattagatatacactaacttgcctttttccgacttatttcgggcgaatatcagagaacgatcttaggataaaccaatagtaggctcgaaagtatcctataggttctgattcagttgtgggatgcttacacttgggcgatccgggtatggctctattaaacctagtgtgatcacagcggtagccattttctatattattaggggttggatatatggagacaccgttgagtttggactcagctgctgattacagaaggccgacttatcaagccacacggtagaaggccgggtatatttggtctaagcgcggttcattatattatattgggtttgcagcgtgaaaaaatatagcgaggatagataagggtcaaagaaccatttatagctctaagatattattttaatacatgaccttcgtcttcgcaatgtcagtctattagtaacaatataacgacgttagatctttaagtgtggtagtgaattgccgcaattatagtaggttacggtaaacctctattgatcgggatttctatcactatcaattgaagtatagaaagttaaggtacagttgagcggcatcagaaaatagcttataattttcagtttattttaaaaggtctactttcaacatattcagatactgttccccttaaatatctaatattgtgttttcctttttactagagtctcgctgcagaaaaggacaataggaggtaaaattattcctagacagagatagatatcgtgagctagccctattctgctcctccgtggaggatattaagcaaattaaatggttcgacatttatcaattattttaataactaggaggagcagatagcataaagtaagccatcgagtggtcgatgaccacaccacatttctagaccccttagccggtagggtaggtccgatttatataggggcaggaatatgagctgttatgatagcctctaccgtacccccagttagcagagtgaatattagaattattaaagctaagggcatggcggcgttgttctaggagggcgtttaggttgtctttatgctttgagtggacgccatttcgtctccgacacatacgccgacagtagggtaggtcgtaattatatcacgtgcaaaactctcggtacttaaaattatcaacctataaatatagcaatatcggtaacgttagttaatcaacgtactggttttgtacatgaggcactgtttctagtatcacggtagtcgttaggactttggtagacatatcatttagcctaggctagatttaattcctctatcgaaaacacctgtctcctagctatatcctgctctgtggattagagatagtgcgagggaatggggtttgcgtggtaggggcttcttaccgtatgcactggcaaaaccagctaattcccaagagaagcgcgttttaggtgatctacctaaggatagaactcagatatttaagtagaaaggggggctcacaaaggcggttggcctaatatttacactctctcatatttcacttataccttagcctttaaataaatcatgctggcactaggatcaccaactacccgaaatatcaacgttagttaataaatagctttaacggtatctggatcatacacaataatatgaattgttacttaacacgtttaactacccaaagtttcttaatatagctacttaaactaaatcttattgcactcaattaatagcataatttaagagcttggtctgttagcacaacttctgtcaccgtatggcatatacgtatatagcttcctatagctgtcatattgaacaatttctttgatatttcggggaatcacagcatattgatctggggaatcaatagaccaaaacttgagatattaaatttctcgaaacataccctgtctataagcttgtttgctaacaacatccaacatcaggtggaaagttcgtatatcatattgtgttttggtggcaaaagaaaatatagccggcttctagcttccttgaatttggctgatactattgctttgctaatacagacttctattcatcaagatggccatttctaaaatttgatgatttttactggaagatgagatagactcgcaggaagtaagagtaggatttaacaatcaacatgccagcaaaaaccaaagtaaaggttctttcgaggtacataaacaatagtatatatttactatctacagggttatggttcaatttcttttggaaagatgaagtatatttggcagaatgagaagtgtcaatctaaataaaagcatgctatctatcggtctatcagcaatcagtctaaccattctatcgagcgccatttaggcgatcttcaatctactgaccgccgagggcttccgtacaaaaatctcttttacaattgaatatgctatctttctgggctcggaccaatttccttagataatagggatacatgatgaatattggatggaaatcggaaaactgaacaagaagtgatactgtgagacagggatggacgagaggactattgggcgcgcccaaacgtctacatacagactctttgtgagagttcacaactaaaccctagaagcaaaagggcttccgcaataccggaatgagagttagaataaaaaaggaaaagatggaaaataccagtctcgatgcaacggtaatacttctgaccaggctcttctctgtgctgaaaaccctgatatcacgtatcaagagcggtagatactcgagaacgccggatatccttatcttctttcctaacccgctccagcctatagaacttataaagtgtaagaagtgctaaacaactcagaagagttgctctagtaacagcagttattataatagccatcaccgaccaatccccaccttgagatgtacaaacattgatgacagtggtcagtagcccagcagcagtatataggtataggggtctagtccaggattagagttagatctagctttttatacctctttcacttaggatttgctcacttatacaaatactttgttaatcagccaggggtagtttcccctaagctttaggaaatgcatcagccacataagagccgcaataccactaataaaaagcaagtacgcaatagtgagtaatagggggttctatatcatatatagaactgtgcgaccggcctcattggcttgtaacgtccttttaacctggtttaaggtctacagtaaagtgaatgtgccgggaatgactagatagccggctagtagtgcccagttagccgcactaaccgtgatactgaaccgtatgtctatatctacttcttccctaagcattctagcgtagatagtttcattagcgaggtatatctggttagctctacacaggccgggggtcacatccgtagctaagcaaggcggaataagcataggttcaatttcgcgaagtggcgtcttttctgatcctattttcgctggcgtacttgtatgatcgttctacaacaaaggcaccaaaggagttttagtattaccgtaagaaggtaaatcaacaaagaatcgtatcagctctttaaatagtccatatgaaaggccgctacggtacgtggtctaactaggtctagaggtcctagtatagagggagacgcatttttgccttacggtaagacttacacagtccgggttccgaagccaaaaacgaatggcttctaacgaaagcgcgaaagttgctatataattagtttaagcgagcgttatctgcgaatgcaccggcggaaggaatctggtgcttaacatatttttggttcagaggggattttaaggcgagataagattatgccaacttcaacctaagcgtcgaccaccattaagccactgcctgtccctttcagataagagcccgtatataaggttcccaataggcctattctcttaccaatctctcaatcactcaatctctctaatagctgcctggcttaaccttattaaagagaatgaatcttgggatttagttgataccaactgcctagaacaactagtgtaggaattacctaatccaaaatattaatatccatccctactctacttttacggaaattcaaaccgcaataaagccttgcgggctctattcccctataacaacattacacagaaaggccctataggcttaatccgtctctatcttagcactaagaccgcctatacacagaatcctatattatttactaaaagcagtctatatctcgaacaaagcttaggggattccaagtagctcaagaattcaacaataaggtatcaaaccttcttactagggggtacagatgggacgttaacccctataaggctacagtaagaggttaagaggtaactcgttttaccatagacctagatcctatgtttattcctcgattccgtccctgacatccaatccgcaataaacttattacagagaccacgtcaatagcttacaattggcgataaggttattcccgctcccctgtaggtagtcatcgtcttgactaacagttaatatataacagaagccttcgtataggaatacgcttagctccaaaagctcgatactaggacagtcacgattctagacctacgtccacgtcacgggcttttagatagtatcgttttctagccactgcaaatattaatcgttaagcagcttagtatagtctaggccgagcacatttccaattatcgacgcttctcggcgttttatctgagcgctttctggagcacagaggtacaaacccacgaatggctcctgtatataccactatttaatcttttggaaagagcccgaagggactatataaggaacaaaacgatagacgattgccttcgagaggttatacaaacatgcattggctacctaaaggaggactttaataaccttatagcctcggccttcttaatagacacctatcccccttaaatatatggtataactataattcttaacttatactctcctgaacctaactaagaagctaacctgtctaggattctcgcctactgtggtattcgctaaactttatgagaagcgatacctaagtatttaggataataagttcaaatactatattactagcgtttcatcccgcttcgtacaccactttatataattgagcgtagtaaagatatcggtagccattcgaaaagagacgttatatcgcttatattactagtagggtggtcttcgctccaccactacttatttggtctgtctaagtcgatccccagagtatatactcccgtgtaagcatacaatatataacacttgtgtcgtaatcttcggaaagccaagtcgtcttagggagtaccatttcgaggttactcaatgtcccatctgtaaagagaggtccgacgtcaccgttcgccaactacctccaacgaagccccctgtgattctcactttagatagtggtggagtgcgcggcctgatccaactaggccttctacaggttttagaaagtcgcattggcattccaattgtatctttaccggacctgtgcattggaaccagtgtaggtacgtacgccgagtagccgagtcttttattgtggttgatatactaagaaacctcctctaggcgcattaacggcaattgacgtttttctcaattaatcttcggtcacacaatgtttcaatgcgttcctacacctagcgcaaaacattttttgtcattcgtccaaaaccccaattccttgctatatccggtggtttgcctcggtattcaacttgactacagatagcctttataatcccgaaggtctatcgaagattttgaaagtagccgttaacccatctcgttgtatattcgatatcgccaccgccaatcctatgggttgctggatcgccattgtagtaagccgtatatctgatagtaaagcctacgtgttagccaattaccaaggaggaagtctacgttctaccaataccgcctacgagtttctaactccatataacgaccgataaaacccttccttacttaacgcgtaagtgaccgtttacagccagttgatttagatagtggtagtcgaccttgctaatagttagcgtttaataggtcgatatacagtggtgtagcgcccatataagtccaaacactataagacatttcaatacactgacattttctagctacttctaaccaaaagagttaccaggcctttgcctacaagacggtagggtccgtgcgaataacccactcgccattgctttgcgagagtcgagcattatctggcctatagcgaaacgatacaaccttctcctctctatcagaacaggcttctccacatctccccctagttatctaacgggcatactaggtcgactctgggagggactcttccccaactattccgggccataatatactctctatctatagacggaaagcaagggtttttggaagctctcaattatcttccccattcgtcgacacccgatattttccggctggaccaggccatcgatggtacactgccagcattagacgatacgtgctcgctggaaaaaatgtcgcatatggactttgcagtgccagctaagctcgtaaggaccattctcgcgtcggcaatgtttttctttaagttggataaaactcctatctagggtaaggcttcaatttattatcgggggtctgttctttattcaagaccaaatcctgccgagatcttatagcgggtgcttatcgagttccccggcgctagatttaagtctggtcaggatcttgatttaggaagtatagatctagtcgacctttgccggttttatagatacttcagaaagcgcgttgcttttcgggtcaccagccttgaggaaagagtctcaattgagatttccaatgacacctttcgtgaaaagattagtggtttccccaaatcagcgtaggaattcctcaataagcaaaaggcttacgcccagtttggtcgtatagattatcagaatcaagaatggccgccgcagagatcttattactgctattgtgggtcaaagcgattagtccacttcctagagcctactttagggcagaaaaggcggcgtttatgaactgggtgaagttatggtttagcgctcaagtcagttaataagtagaatacaaaatctagttaggtctcgacgggttaccccgataaaatgcaagacgcacggaggctaggtatactctggtaatatcaataacaattagaatcatatgattatcctagatagaagtctgaattcgaactgcaggatataatctatctataccttgtaacccgtggacacgtgttatagtcgccctcgtttattgaaatctaaaagtgcgagtaggtggcggggcgaagacagaagttcgcccgctatcaaagaaccatacgacgtctctataataccaccccttagtatagcaatatacttggcgcctgggaacattggtaaaattcctagagactaacttggtactataccggtgctagtctacggctaagagtgcgcggtttgtcaacgtggtgagaatgtaaggcaagccgttcagaaactatcttagagtacaaattgactatttcgcccatgaaatggactttccgttcttaaaacgctagtaactcccgtcctctatgtacgtcggtttcagagagccgagacgtggatagtccatgaccgatatcaaccctttccaacatcgaactcccggttactctcgcgacaacacttcaagcatctacagtcgatccacggacacagccaaagatgctatccctattaataccataccaactaccctataaatcaagctatctcttcctaagataaatttactggaccaccaaatctctatggcgagcggatctaccatggccttggaaacaacccggccacgactaagaaaatccaagaccctgaccgaaatgtcggtttccgagatgaaggccgaaagaatgcagcagcactgtcacctagacagaattaaatctgcggcttgagcattttcacggaacttgaaagtataggagcaatttcaggattcattctttatattcctactcgttttacgaacggtgcagttcgccatgcgcttgatgttgtaggtaggatgcgcggacgacccctaagtacttttgaactccgcgtgtaaaaactgtttcactttagagacaaagtcgtcttcaacgctctgaagcactctcctaacagcttccggaagcaaaaccaaccgccgggctaaatgatcggggttagcttcacctaaagaaatttgtaagcaggcattgtgttttagctgggctctcagctggtcgaactctgaaaccgatatcttcacgaacttttgaatgcgataaagtcttttagagctttcgaagctagcgatacatttcgaaaatttgatagcggcgcgaaccatcttaaggaatgttttccgatcgtagggaatgcggtgtacagctgtgtggcgaatgctactaatcacgcgacgccatcctgttaacatgctccaggtcaactgaaaacattcgtccttaacttttccttgatagacttctaagagacaaaagaatttgtgcaactctaaggcctctaggcaagtccatccggctgcgagagactccgatagaagccaacgctgaaggaagcagaaggcatgagtttcgagttattgctgtatggcttacaggatctggtattaagcgcaaaagggaaagtagcgagccaaaaatccaggtagtaagattatactttctatcacccctatccgaagtagttagctaattagtaagcacgccggttatcaaattcggtgacaaacatacacttatgtagcaaatctttcgggaccatagaggtaactaagttgtgaattttagcctttgggggttttataaataataacctaaactaatgaagcgacatatagcctataagctgctgaattcccctagtatatatcattgctaaatgtaagaacctagttgactgaggttggggtaccgtttaagtgggtagaatgaattcaaaaattcctcatgtttctgagtaggcgatagcatcaaattgctgcgggccaacgagtttagattatgacttcaataggggtcggtagctctctccctcatgttatatatatccccaaaaccacaattgtattgcaaggctgcctacaaaagtcaggtatataacatcgaactctttccctcattccccttcacgatgcatatagcgtttctaaaaaatattacagatgatcgcactgggggtcttcattgtgggcgtcctactggttacaattccagtggtatgactctttctctcgccgtccgagtccgacttatgctaacaaggtcactccgtccactttcattccgaacccacctcatccgcttgtcctcagtcatctgtcttgaaaggagttaaagcaacacaaagctctggaagtgtcaaagccatcgaagcgaagactgcctaacaggagagaccttccactgctgcttccactcctgttctgcactggtttcctcagctcgggatttatcaagagctactcttaataaaacaatagctcgaatcaggcgcaggtcaccagaagggctttttgcgggggtgaaatgatactgcagagcaagactttgggttgcgtccattatagcgctgacgagttggtggaagctctcaaaacacttgcaataaaaatcgttctcaagtcccttggagtatagaggatggcggtttaaagaaaccgggggggcagaacccgtcatcgacgcgggatgggtcttggaaggacattgttacgatctggtcattcgatctgatcggtagtgaatataggaaggatacttctttgcccaggtgatatcagactttttatagcaaaatacatacattttaatttactaatcatagatctgcatctcgaatttagttaaggctctcataggtaaatggtcaccccacataccttgtgtaaccccaaaaacttttaccgatcaaccacaccgtgtagaggacatacagacatacatgtagcatcgcccagctcgcacctagcaacgttttctccaccattagcgtacgcccgtgtatttgctaataccctcacatcccccgaatctacatacataacaattttatcaaccaaaaactgtcgattaccataggtcacaggtcccggtgcaagttccacggggggtcctatcaattacccgacctaaattatttaatgtaatgtgaattaacaaccctccccccaccacttctcttatatcattgtgcatgcaccttcaatgttaggcgcagggcccaccccaccatcttttattattctccctaattccaaggcattttatgaaattgataaaaacggtgaatacatatatgtattgagctagaataatacttgaaaatatcgaagctctataactgtaccgtaaaggtcaatcaacaacatttaaatgttaggcctgtatggcgaaaatgtccttaagtactccaaaggctcttctgctgtattagtgatttcagtactttttatattgcactcgatcatatcacagattgacggtcgctaagttcgtggctatgtatttacatgtaatcaatttgcctcaccccaccccgtcgatgactctgcttcccccgcacctagtatgagttggcattgaatcgcataaaggactactgtactgtcctacgaattcggctactcgggctccagatgatcatcctatttaaccctgaagacaggtttagaacccaactcagctgaataaagtgattagctgtcaccatctgtgtctactttggatgcatattgttcgcctgcaccgtgcactgatcgtcgtttcagatcgacttgtacggtgtccaaacgctacatagtactagatacgtattaccactcgtgccaataattcttactgatcggcaatgcacatcagcgaactgagactaccttagctaacttcaagtttgcctattcatttgcaccgaaggcttctttagaagagaaaagattttcccatcaccagcaaagggtggcaccatccggcgacaaattgttccccagtaatgaagtcagtcattcagtcacaaggaacactcgtgtttagtcaatatcgatgaagtggttggaatattattcgactgtaccatgtggctggctgaacactcgcgatccactttgcggcatttctcgcgaatggacgttaccatgcacaggaaggtttcgctcctgccggcttgaagttcgcttggatgaatccaagtctcaaaatccacacagcttggctcaagcgtagatcatagctgttaggacgccgataaatacgaaggaatactgcgtatgagtgctgagtaaccaacaatgtctgctatgggagggaaaggaagctattcatgatgctggtcaggcatctttacatgcgggatgtgggtcctgtgacgacccacacatccacggtgttgttaagttggcaggaaactttgccgagcataaataacactagcctcctcggtggcctatcattgaatccacgctcatgattcctgcagctctgaaagttatcttttattttgttgaacctgattctggactgtaatatgatgtaatagttggcaatgccaaaattattgcgcaattcgtgtaacccggcagcggaaagtttcaaggaagtccgaagaaaaccgcgagactctaaacttcaaagggaaaaatttaaaatagcatagaataaaatttttgagggcgctgtatgggtttgtgaattaagctctggttatatctgatttgtaacctatagttgtcgctgaaacacaggctttaaagtctatgtagttatctgtcttacgatctagtaaaggcattggtattatcactggtcggcaaagagtagttttacttcagtgcttgaaagagtctccgtgtctccagcacggaaggtgaacctgggttgttctgggcactgtttcaggcaacacagtacttgcaggcggaggggaagaacgtaaacactatttacggtaatttaccgtgactcatccaggctacatagcatgatgggatcttagcccaataggggaaagtggcgcgctgtgagataagaagagagagtatcgaggtaaatctgatttcgaatatcactgtatagcctcgaaaccgctgtagagagtcgggtttcgggacgtactgtacaaatccagattgcgcggacgttgtggttgatactattgcgatataaaattattgtgttgtgtgccgagcgggagctaacgccagacgaatggcggaccacgggggctcccgagccccttgccaccacaaccacgcggagaggcacggggatcgtcgtaacagaaaaccttgcaccaacgaccacggtccggaccaggagacatgcacgagtggaaagcgagcagacccacgcggccccggagcccgtggaactgaccaataccggaaccagcactggacgagtgacaaccagagagatttggcagattatcgtacacctgcaacacaccgtcgaggagcaaaccacgctcattcacgccacccggaccgaactgagagaagtgaaagataaccagaacgagcatcaaactcagaatgagaagctacaggaagagattgcagcgctacggtcgcaggtaaacgagaggaacgctccaaccccgacacgatcatgggcggccgttgcggccagcacggacaatccgcaaccccgggagacccggcgacaaactgacaaagacgagaactgcgtccgaatcagcacccagcgatccactgaagtgctgggcgcagataataacggagacgcgttcggccgctacctccccaccccgactgcgaacgcccacatcaggacggcactgtcgaagacgctatctacccaggacgcacaggttacggggattgttgctactaagaccggatatgtgatccccgttcaagaaccaggcgtcggccgaaacggcccgcaccaacaccgagtggctgaccgggcttggcaacgacactagactggtgaagccacgtttcagccgttcaccataccccgacctttgggtaggacctcgaagacaggaaaaccgaagccatcggaaagatcgcaaacgagaaccacctccctgaccgcggatttcgaatcgaagacatagcctggctgaagaaaagagacaaagaactggggacattcgcctcaatgggcatctggttcgactcattagaggcagcagagtggatgctggacaatggtctattgatcgatcatccgcacattcgaagagtggaaaagtgtgagatcaaaaagaaacggtgcttccgatgccaaggattcggcgatctagcgtggtcgtgtaaagagacgcctcgatgcggccactgtggcggccaatatgagcgagaaagatgtcctccgggaatcagagagcgctgcctggaatgcaacggggaacgtccgactggagacttgctgtgtccgacgccagccacggcacccccatcgcaatgctagagaacaaccttcgaattctacaactaaacactatgaaatcgggggcgggcatggaagctctcatcaacgaccatcaaagccagaaactagacgtgctccttatccaggaaccgtcgattactgcctaccaaacacacgtgaaccacagcgactatatcaacccacagtggagagcgattcggttcgattccgaagccttatctatgtcaatcgcaaactctcaacctcctatcaccgacaagtgagatgcaaccacccagatatgaacgcccattgggatatatattccaatcggacacctcgtcccctttcgttgaaagtctcagaaatccgataaatggaacattgtagaacttgcagtaataaaaaaataagggtagaaaataaaataaaattgaaataaaaatttaatgtttctatgttcttgatcacacgtccgaaaattgagtgttgacaactatggccaagcttcaacgggttgaccgacggtgatccaacacaaccaacgccactaatactcgtctctcttgctgagctaaagacataaaaattgtcgctggatgtcgctgcaaataattgcggtaaaagaagatgtgggtttcaacaggcctcaattaagaaatgtgtccttcaacacttccaaccaggtcggtgagtgacagaggccgaaaagcctataaatacgtcctctacccctgcaattgctctactttttattcacttgattctgcaaagtcgagcaggcttgttgtgtctgacgcactcgataagctcccccctttgatcgagtactggaatttataccgtactgacatttatagtatacatcgtggaccagcaaaccagacagttcctgtactgtaagagacgtggttccaagcattcactgccacatttacgccagccgatcggagatacgagatttggattagctggtcaaggcgactatgcgaagacgtctctgctatagcgagctgatctactgtcgcggctctggttgaccacaaatttcaagtgcaactgctcacactgtaggtatatgggcccacaaatccttgaaactgcactgacccgaaagacgcgggacagccagatccgtagacgttcgaacacaatgcaccagagcaagggccactcttcatccctggtcttgaccatcagaaaatgtgagttatggaattccacgctggtctactggctaataattgacagtgaacctttgggagctcaccagagtggccctgataaccctgcactaccgtcagtgcaaagccatggcttacacactattcctagccccgtcgcttcgaacagtgcagcatgtcctaggtggaagattgcaaaccaagatagcgagtcaacaacagggtgcggccatccacgtgcgaactccgttgcatagaaccttgcgactccaatttccatgctaaggtgaatgagatctaacgcctacagctgcgctgtctgattatccgcgccaagccttattcctctaaccacgaacaccactaacatattcacactattgtagaggcaccccatcatcgacggtgaaatatactgtggcgagtggcctattccgccagatcgaggataagaccaaggtggcggccgaacagcgtgctccatcgcatcgcgtcttccgccttcgtccccaccgccttcgcactgttgaggagtcctgaacctctggcatcgcgacacgttcatccgccatggaagtgcaatgtttatcgcgggtgggttcgtacagtaaaacgcgtgatcaattgtactgacttcaggccaagacggacttctgcaaaatatatggagtgaaaatggacggagcgcgtctgtatctgcgatcgactgtatagaattcagattcggagagtgaagacccattgttactcgacgcaaggggtcagaaatgtcgggacaggccgagacgcgaacccctgaaccgcccgaccgcgacgaacacgaaaaatcgccgccaccattattgagaccgagacgcaccaccagaccgcgtaacaactatggccaagagcaagaaatcgaaatccagcagagaaatgcgcgctctcagcagaagaagagaacccggggcaagccagtagcccaacgtgaagcggtgacttcggacgacgcgtcgccagcgacttactgccattcatagtccgcgtaaagacccgtgctgtccatcccacgcacatgaacttgggcgttgatgagctagagcttccacagcgtccccgtttatggtctcattgaggattcgtctgcgataaaaagtgtaggcaaggctggaagaaaatataggcctggaggaaaacataggcctggacgaggccctcggcggacaaggtttgcgctttcttgtcacaattgagttttccctgaagaagattccatttctcaaaagaatggcccgctccttgtcattgagacttagtttggaatatccgttaatctcaaccagcggatggtccatgtcagagctgatgtacattctatcaacaccattctcctccgagactagttggtccaaaagctcactgatcggttgaatgggcggctgtgacgatgctcttgtcgaccatccaaagggtggctctcccttctttatcagttgcaaaagacagattgcatcacttcggtgataatctaagacatagcaccatgcgagggctcttccaaatggaataagtagttcctcttgatgtctttgtttaaaaatttcccatccggtctcaaagacgtgtcgtacagtatctctgtgtacgatatctcgccggataatctgactgagctggatcagcactttgtatgttccccagtcggtctttggatgaagatatttggcgaaagttgactcgattatttgcctttgtggtctttgtgcttgcaaaacatttaaaatccggcggcagacaagtattgaagaaaaaaagtcttcgagatcttgcaaatttccgaggatttttaagagcagttcaggaggtagagcaactagtggaggtatggcgttgattttgtggacgtcacttgagtctgcagttttcttggtgttcctctgaggcagttgcgcaagcttggagtgtatataggccaaattttggcacgaacgagcacaggtgttctcaggcattttgatattggtataatggtgtgtaatggattgagtcgccttgagggtggccgtggggtttaaatatcagcatgtgaacattgcaccttgctcagccaagcgcttcgcctcccgatacactgattggtggctccgatcacttagcatcaagtagttttaattgaacctccaaggagagaggagggagaactgtgttatgcgtctgagaagacggaaagaaatggcagaatcctgggtggcctaagtgggattagcgctctcctaggaactatattaatccgagttcgagtttggatatccagattgcaatgagcagcctaatcttatcccctatcctccgtttcaagtgtgctaatagagatgcgagatctcatatttatttatttattttttttttggttattatagtagaacttatgcatggtctaacaatcacatttgttgaggtccgcagctttaaaatggctccctactgtctatttgccttgtttgctggatcaacgttctagaacccctggagttcagctgtgggtctgtccgtctagacagcttggccacacgttgactaaatctttgaacccgagactatcaagatactttttgcttctacatttttctcattttgatggcagtaaactctacaggtttttgttcatcgagtgaggctttcaacaaagtggaaaagggtgattgatatatatacctcctcaccgagtgtcttctgaccctcaacatcttgaggactgatcaaatttgcccgaccgactcgttgatcactatcctatgatcgaattgaccgccaacaacggccgaagaataaccattccccagtcaaaacctgactacattgattgactactgctgtagtaaaactgtatacttagtcagctgcgtctgcatagacttaaaacaccaaagattgatgggagaggtattacccagatttttgacattctcttgcggacaaaatggatgccccgaacagcttgccagaccaggaacatgaaagcaacaatttgttggcattcgggcttagtgaagctggttcatccctcaacaactttgagcctcgaaccataccaaactctcccatccgggagcatagatggtaacaattttaaaacaaatttcgctctgcagacaccattccgagctgagacagttattgaatcatagaaaacaatgttcggaaaatatcttatgcttttttgaaggatgcttttctaaagagtgatgacgtattctgatcactcgccggaagtcctgccacgccacatcaacttaatgcattcaaccaatgtcctccgttcttgctttagattattgatttccattatggatttgcatgaacttctcaacgatgcttcctcgcccacagcgtatattcggcccaataaacaacatccgcggcaatcttcagttcagactaacatgctgccatccttttcgacgttggcgaaaagcgttgactatgcaacaaataatgatagtcagtgcatcttgagtagatatttcccaatacttattcactcacagtatgtattcaggagatcgatccgttcaagcagcatcatgtcgccgtgatgccgcccacgtgcccatctgtcacccttttcaaccacatcatccagaccccagcttcagccagaaaatgagattcccaacagaccaccagagcgccaactcgatatgttgctatccgcactattctatccccaatgcctgtccaggtagttttggaacacacgttcagggatccttcccctcgtcagcgcccagcgtgaatcactactcttccctcatctattttccttctcctcccgctactaattctgcaagcaattatatgtgcacaccgtacacgacctcgttttatgatcccatgtcacattgctgttcgtttcagccagaccctatcgagcacatacacaaagcttggggccaccagcaactggttgaatctccgcttttggcccaaatagtcagccagcccggatatcataaacgtgtcttcccgcgaggtatccgtgcaatgcgcaagaacaacaatcaatatgaatgtagatcttgcgacaggctcttttcgcgcccctcagcactcaacatccacttccgttctcacacgggcgagaagcccttccactgccctaacattggatgcgacagggcattctctgtattgagcaatatgaaacgccatacaagtgactgccggaagaccgctaagctctagcggcgcaaatgcaactccctccatgttctctcagaagattcatttagagaaaccggttccttcatttccaacgttagggcgaacctgtaaaccccgattcgcgcggctattgaaaaatttccggcaagtgatctcactgatttaccaccgcaccgaattttccaagcactatagctcctgtcagggatatacatgaagtatacaggacggatggagttatgaggtatgcaagacccacatggcgtatgcaggttcccctgaacgcgaggaagctacagtaccttttttgcttcctcacgctaggtcttgtatctagagtcgactatatctttctttaattagtcattactcatctgaacaccctgtcttcatctacggacacgtgaacccctaacagtgatatttctaatccccaggaaatttaaatctacccctgggatcttcactttacgttcctgactgaatatgaactggctttgggaacaccttggttagatctgggagctattgcgcttctggggccccacttctggatcctagagtcaatatcttgtctgctggggtcgcggaaagccctcacaagacaccttcaccagacctgcgcaaaaatctgcggcattcaattactcctggaaaggcaatcaatagccccaggaacatgactttggttcctcgaggtggggacacaagaccccagaacctccgttgggcttcctggggcctacgaggctcctagaagcgcttgtatgctcccagaaagcgcactaaagactccgggagcaagagaactcccagggccaagatgtgcattcccggggctgataaaagccatctctaggaacgagactgatttcttgatagtgacaatggacagtcttacaagccacgaacgaattccgtgttgttgattctagcgtcacaccatggcctaaggtctttttattcttacatattggtggcttcgaatggtgctggtattcaatgctcaacgtctagtatcaaatatgcaacacaaatactgcatacctcctaggagccagcagtagaccaagaaattatcccttattgtttcccttttgccctgttgaggtcacttcgtgtctcactttaaacgttgaggaacgtgaatggtccggtcgatagcatatacatatacatgttccaccttgggtatatatatgttgtatccaatcccgacgaaaaagcagacgatcacactcgaattggctgcattctcatcatttgatagcaatgcattgcaaagatccctttctcggggctagatatggtttgtatgtccctttattaaaattgtctagcaatttgacctctagcttagataaactctcggacaatagatcgccccaattttggaagtaaccggggattctagcgcacaaatagaggggttaaataactgtatattgctagtcaatatccctactacgtcgttggacgtattcactaggatattgttaggtaaaaaatccggatagcgaagagtcgggcgacatatacttactataccggactgtcacaactctttatcgcaagcgatccgagtcgagacagatgcaaccctcacgactcaggatgatgcgaccgacccagtgattcctaatcctatgtattcacagaatctacacagttatcccgagtctatggatatcctatggtcgcacagtagtattattcatctccaaatcatggactcgtcggacttccactcgtcggacttccggatcctttcagatattagatctgccctactgcctcgaagcttccatgcgattcgatgtcttgaaatttcattattacatgctttccttgatcatcagattcaaatcctcgatgatgagtggtatgatcaatggacgagcttgtggaatgtcataaaatgtctgaaggggcttttgcatgtccaagcctggctgaagatggaccaagagccagggaatatgatgactgccgaccaggaggcaagattatttgcgccactcatggaacttggttggatacaagatttcaaaatcgagggaacatggccggcaaatgaaggtttcgaaagcttgcttcttggtgggccgtttcagacgacgatagctggtggaggcaaccgtgacctgcttgttgggaagcttatgactatattaaatacatatggtatacacatgacttcacgcccctacccatgacacatatttcaggaaggtagtcccaatagggtacatttgtggcggagtaatcattacgatgggttccgtggctaggacagcttttcttggtatataagttgctaccaggtattcaggagcctaagaccatggatattttggcagagatacgaggctacagtctctttaataacaaaggtgccacttctctgaattatgtcgatttctaccctttattcaataattccaagatgcagagtcttcgtaaagtgatttgcaaacgacgcacgcaaacatgctcacttacgaacttccaacttcgacgcaacatggccttctctggaagcaaagtcctattattggaaaatgagtgggagaatcatgcggcacagaaggaagtccctaataaatcatcccaaactgatgcgagcagaaaggaagcatatcacaagaaaggtgaatctgactccctagaatgcactaatagtaaagtaaattactaagcgctgactaacccgccatcattttagaaccgcccatgcccaaatcgacttccgcaacgtccgaaaccaaaggagctcacagacatgatagtcttaaaatctaccgcgaaggccctaataccgagagtggcgaattggatcctaaatccaaatctgaggaagtcaaacgccacaacaaatttattgctgatcatcatgaaaagctttaaatttgtctgactgatgtcgactttcttagccttccatttccgtcatgattatcactccttactaggtgtctgagctttgaaggtcaatgtgatggatattggtttggttattttggtctattgccttggaagaccctgaagaagggaaatttgttcagaaacgtgccgaatggacgtttaatacagattctaatagcggcgtttcaactgcagtcgcccttaatttgcttaccatcagcccgtatgccctttttagatatatacttcttaccatattaatgaacatacttatctgtttacttgcaatattcaagtcactcttttcgttcattatttcaaaggtcgtgttgtaattcgaggaaatgattgattctcgtatgccaggtagccaataagagccgattcttccctttagtaggacgattgccaaccatatcggcgtgttcaccggaaatgggtctcgcgggctgggatctttgtgtgctatggatgtttgctgcctagcacgaaatgtaggactgaagcttgccagtgtttctataatctagccggtgatcggagacgcaaggctcatgtcgccgaggtctcaaacttccgtgtcgccctttaccggatgactggagctgctccattgtacgcccagcccttctatattaggtaagacaagcgtagataaaggctggtccacgggttacagaaaagatgagtaatttcgcctgacctttcctctttgcttggttttttgcatgatagcttctagcccgatgagcgtccaaagggcgtacgagatacgtcattcataaccaccaatcaggaagatacaatcaagcatcaattttgaggaattatcttgatttgggccaacatatttcagaagttgttgcatctcaattacgaccagcagcagtaatcaaattaccttcgtcgcttttacgactagtgaaatgcgaatctcagtattcctcaggagtttccccgccctttcgaagcaattcctggtatgccttcgtcttacccaggttgattccaccggggctatgctgagcactaagtaaaccggcttcattaattttactcacatcactacaccagtttcctttgttttgactactaacgctttaggtccagcagcaacactgctctggtctttttgtttattggcctggtcatcgccaacatcttgatcaagaccttgtcccttcacctcgtctgagacattttgggtgttcaatgcactgccattaatggttctggcattagtctttacccatagactctcggcactagttgccagatagcccacttacaacttataaccgctcatagggtcaggaatatctttggtgttgaacatgttgggaggctggtaattgaattattcgacaattggcctgtcttacggtaagtgacaatactaatcactttaacaaatatgcgatctctttataggtcatgggtctacataacaaaaccgtgtaataatcatcatacatccgtcatctttaagcttcaggcgtattacgtactccaccacgtggagtatttgacccactctgttgaaccaagttcagaatattttcaccattcgatagcggatatatcaacctttatatttagtaacaccagcaaagttatgaggcatagtatcagatagatgcgcgtcattagcgaaaatgaaataacgccggagaaagtgggaacaactaactcgtcgcattccaatgctagtaaacgatggaaagaggagtctatattcaggccgttccacagtcctggaatgggtaatagcacatcaaaaatggcacaaatgtcgacattgtcacagttatggcaagcattttgctttacgcttgtttaagttcggttatcttaaggataaacatcgtcaataagatcgtgcttagccattgtagtttgacagcctccatatcagcggatcctggttctcttacagttggggagtttctaaagttccggtctctgatattatttcattattattcgatccatttgttacgtaccccgcatctacgaccccaaaaacaacttagtctgtcccgtgtggcgggtgttcggacgagtactcataacacattgttgagagtgctcatacaataattgctttggttttggctttatgcgtatccttttctatctatgctcatcaaatcagtccttacacggccctaagctgcgcgactctgtatgcaacaattggcttatccagtaaatgtccctatgactgcccggcgctttaccggaacaaagcctttagccttcttcttattgctcatgtggcttcgcttttcattagcttttgacagaaattaggggtatggtgaacgtattggtaaatccacgatgataccattctctaactaattaaaaaacaacagtggtccgtttttgacaatctggccggacacaattaataagcaacaatgcatagtctaaaatcacatgattcaatggtactggactcggtaatccatgtggtcagtctgtttctgacagctttcgcttcagggccacagcgtgcgacagtgcgcgtcaccattgaacacatctcgatgccagtcaggatcaccctaatagtccattatgatacaagcgcgtggtgtaatcctctgattaacaaattcgaagattgttcaaatcctggcgggtctgtcggtattgattgtagttgtattacacgcatgaccctatatctaactggggatttggagtgcatggtgggaaattcttggtaggaagtggtaggatttagagatatcggaaggggtattggtaggtagattaactaaaaatcgaggtactgtagttgtgcaaattttgtcggggcgcatcaacaacgagaagcggtgtgtgtgaaccgaaggtaggtcggaaggcacggatcaccttctacaagttcgagctagatttcttttctctcactccaaacgtctccttctcagggcctttgcacttctcgcagaactgggtcaatatgttaagctttcgtaccttgacttctctcacctgtttgacgtatttcgctttcctgggaggtaatgtgcagactcgtggttcccagcttggggacagtatttctaagcgcgaggttctctatgttggtggactatacatgggcatcacagcaaagcaagtcttcattctgaccaattctacatgtatctaagatcttcacacaggacaatgtcgttaattctacatcaatggctctggtagggcaaatttacgtcgagaagctttcccctaagccaaccccggcgaacccaccacttcccattatctttattgggggcgcggctcagaccggcacgaatttccttgataccccagacggacgaccaggatgggcatcctatttcatctccaaaggtcacacagtttacctctcagaccagcctgcacgtggccgctccttctggtatcccgaacagggaagtattgggtaccttggctcccccgattctgtctctgatattttcaccgacgtagcaaacaacggcaaccaatggccacaagcgaagcttcacacgcaatggcctggcaccggtcgcattggcgactcaacattcaacgctttctacgggagccagatacagttccagactgatcgcttcataagcgaagagcaaaatgcgcaggcgtattcagctctagtcgaccttgtaggcgactgttatatcatcagtcactcgcaggcgggtgcatacggtatcttcagcccagcactatgactcgctgaagtgattaacgattgagtaggctggagggtcggagacatgcgcccaggcctagtcaaaagtattgtccagctcgagccgtttggtccaccgttcacgctccgcccgccgtttggaaatcgcccagctttcgctttcggtctcaccgaccttgcaatcggatacgaaccttctgcaggcaagaatgccgaaaatattgagacaaccatcgagccagcaatcgacgccgaccacgacgagtccatcatgcagaagtccccagcgaagcagttgacgaacctgggcaaaatcccacaacttgtggttacaggcgaagcatcgtttcatgcaccatacgattactgcaccgtcaagtacctggggcaagctggcgtagacgttgagtatgcggatctaagcaacgagggtattcatggcaacggacacatgtttttcatggagaagaacaaccttgagatcgcagaccgggtgtaccagtggctgaaaaagcactaatcaacgcataatcagagtcaatttcctcactgcgttgtctcatggtgtttgcacttttaatgtaggtcattgaccgccaggatctttcttccagtgcatgtgaccacactgtggctttcaataattgcctaatccagagatttgtgagcgctattcgtgaacttgactaatcagcgaagtcgagagatcccttataccaagtttgcaagcgatgtcaaagaacttggctcgagagataagtccgcggatttgagcctcagtatttcccatatcaaccccgaagactcgacactgtgctagctccgtcatggttgttgggtccaagccctcgagaattcgtcagctgtatgctggtgatgtatgcgagcggtcatcaatcagctgcctctctttcgatagttcaattcacacccgtttcttcgcattaggcatcaacttttacatcagccaatatgcgcaatttttcccttacagcccgaagcaatttaccgacctgttggcaccgatttggggagaagaaggaaggtatcacacacacgataagtcgttcgttaggaccacgtcatcctgtcacttctaaggaaaacacaacgtataagtatagagcacattttctcgttcgatgctctaaacattgtggcaggataccagctgcatatactgtgcgaccatcctcgcgcaagggaaggctcattgaccccgaccctagttcacaacagaaagcaaactagttagcttgagcctccgagtctacaataagtactgacagtgaattgatagtggtgacatctaacggcgtatcggcaatcatgcgtctcggattttgcaagtgccgttgttgagtcaaccatgaatagatcacattgcgaaaatgtggaaaactggaaaccggagcattcttgtgacatagtatctttctgaggccgccataggccggatagacgtagcggcggcttgccactcgttagagagcgaaatgggtctcgtgcgagcaaaggaaaacacaaccgcggatcgggttctagctagtgttctgtcgccaaagcttgcgggatgttctaaatacctgatatacaccaatagcacctcctaagcaacaaggacccgttccatctccaggatgactgctatcaagtctggcgttgtatctcgtgtctgaacctttgcaggtttttggaacttcttctccgaaccacaaatcaaactccttcatccactgtccctttggccgacactgagattcaaatcgtcggaacacttaacaaatcatttcacacctgtttattgcgagatacaagtcaacaatgtcgtatttcaacatcaagagattaaaactagtgagtagatgtcatctgaatttagattgcaagaaccattccacttccaaattgtacattgcctcaatcccgtaaagaactctctgggtgtgtttcggcagcaacagaaatcggtctttcagacctacgaggcgcagtcttggcaaagaagcttggtgcttgaagttccgtcttgactacgttcgacggcgctctgactttgggagtctattttccaggaactccaatagacggcgaagcttgtccacgcgcgaaagtccaccgatacagataaagaattcaatggcgacgcggttcatccggagtagagattcatgatcctgtgaaagacggtggacagcagcgtggcggataccagaaaccaatctttgccaatttttgtatggtattagcggcttggcggcaagagctgcactgtattttgtcccgatgtttcacgcactaaaggtatattcaatccttgtgcctcccttagttttctcaaccgcgacacccatatttctgagagtctggacaaactcatctagtgagccagcaagcccctgcggagagagaccgtgtctgctgttaggggcgtcgatgaaaagccaaacccagttctctagtgcagctggtttggagaacatgatggtctgcatgtttcagctgccaaatttggcctggagctctttctgcttggcatacataatccggggagctggcaggacacgcccttgcaaatgtataagattgtcgccaaggttgattccgaagaagactagaatagaaagtgattctgtcatctgctagcgtcctccaaaataatgactgtctagaacattatgcccttctttgctactcctaccgcgccactgcgctgctcatagatagctggggctaacgctaaattcttgttggaaggtgttgggcgtattaagttcggaacgctgattgggctacatgttcgaagtaatggctcagcaatgttgctttccaaatattttatttagttacttcaaggcccatcactgtccagatccgcttgtatgttaactgttaaacttagatactaaatactgctgatggcaagaccaggaacagaggatcgtttcatttacacaggataggtaggttctgttggatatcgaaatcaaacacctctatcgtcgctagttattagttaacgttatctaatcactctatcttagtttcgttcctagggtagaccgccttttaattctgcccccacattctacctaatgtggacatcgacaaacatgaacactcatgtctatcaatcacgcctgtctgcctgcacgcgacacaatacataatatttggtctacctaccatgcgcggcgaagtacgtgctatttctttgccgctcagtgatggccgcgtttattgttcccctcaccctgtctatttcccaaccctgagacgcaaaatacaatgggtctcgctgtgtggcaatcaatacagttgcattagatcaagccaaacccctcatatgattgaagctgatgtactaattgaatagatatgtcatcttcaccttggccaggctggtacccagttgggtaacgccgcctgggagctgtaagtcttactgcttttgtgacccatctggcgatgtttaaccgctcgatgaggatatagatatctgctcgagcatagcttgatccccgatggaagtatagatcccgatgttagccaggaaatttgccagaggggctcttatgagacctttttcaccgagaccggaaatggcaaatacgtccctcgttcgatctttgtcgaccttgacccttcggtatgtaaagaataccaaaggcttgaattaaattggggataactaacatattggcggtgatatagactatcgacgagatacgcactggaacctaccgccatctgttccacccagagcaattgatcagcggaaaagaggatgcggccaacaactgcatgacaccctaatatcggaaatccctgtggtcaggactaatatgtgatagacgctcgtggccactatgctgtcggcaaggcgctgttggaggatgttattgaccgaattcgccttgtggccggtgtgcagatctaatacccccttgattcctgacctcttcagctcatcttataacagataattgctcttcccttcagggattcttgatcttccgctccatcggcggtgggactggctctggcttcggtgctttgttactggagcgtctttctgctgagtatggtaagaagtccaagctagagttcgcagtctatccgtctcctagcgtggcgactgccgtggtagagccctacaatgctgtgctgtccacacacggtaccatcgataactctgaatgtactttccttgtcgacaacgaagctgtttacgatatctgtaagcgcaacctagacatccctcgccctggatatgatcacctcaaccgtctcatcgcccaggtcgttagctctgtcacctccagtttgcgttttagtggtgccctcaacgtcgacttgaacgagtttcagacaaacctcgtgccgtttccacgtattcactatcctcttatttcatatgctcctgtcatatctagtaactgcagtggccacgaaagcttcaaagtcaaggacctcaccttccagtgtatgtactctcgtgtctttctttttgaaaccgtcaatttatacttaccgtttgacaggctttgagcccaaaaaccaaatggttgtctgcgatcctcacaatggcaagtatatggctgtcgcccttctctaccgaggtgatgttgtgccccacgactgcaatcaagctgttgcttctgtcaaagccaaggcatctttcaacctagtcgagtggtgtccaaccgggtttaagcttggtattaactaccagaagcctataagtgtgccccatagcgagcttgcatctgttgaccgctcagtcaccatgctctccaactccacctcgattgccgaggcttggagtcgtctcgatcacaattttgaccttatgtattccaagcgtgcgttcgtccactggtatgtgggtgaagggatggaagaaggcgagttctctgaagcccgtgaggatcttgcggctcttgagaaagattacgaggaggtcgctaatgacactatcctctctgatcgggaagtggatctagagtactgatagtgcctatcttcctattgagcggtattattaggacctgccgtgaaatagttatttgttcgtctagtaggtcgaattcagaatggaattccttatcagtctccggattcccaaatctaactagacaatttgctaggactgcaaatttaaaaaccaatgccgactttgccgatgtgctggccgctggcaagttattttaatgagtcaaagacctcatcaagactgaattgccaccaccgtagaacggttgtgtgtagcaaatgaacttagtcgcatcctccatttgctcctttgagccgcgtgataccacgcacgacagctcccttggccaaagcaagatcagcaacaccaggacctcctcttgctttgcagcaaaagtgaattcgatgattaaaaccaaaccacaccacggaaagcaatagcatcaagggactgtttgatagttcccgagccaccctccaggataaagttgacgccctgtccatcgatgatcttttgagcctcagttgcccaggcggggttgtcttgtagttgataatgtagtaagcatcgtactgggctttaaggtactgaaccttctcgtcggaagaagatgttataatagtcctagcacccgcagcctcaatattttgggtggtcaagtgataaagacctgtcatccaaggaaaactttctttgcacaagctttacgacctgtttcaagaatcctgtcccatctatctcaaaacaccgcctatccagagtgccataaaatcgtcaatgtccatttgatttgccggtatggaagccagccgttgctattcaaagccccgagacgcactacaatataagcccgtccacactaatggctctgtcgacccaaaagtccatttctgcggcagcggaattctgctttgctttattttccatataattcggtgctcttcatcaataagcaatgcgatcatagcattggtttttcctttatccaatctcttttgttttggtacttctgctttttgccattatttgcttgattcgatgaaacagctctttttttctttcttctttctgttcgaccatatcggaattattctgcacatatgggggacgtccatatcggtcttgctcttagagaatactggtagtgggaaagtacataataataatattattattattttagccttcagtcattctgagaatcacgctggctgaggtggtctgtgccacttacttgatcacctggcctagggaaaggagagaacgagtgctcattgttagggtgtttggttcgttggctttatgcagcgtctcactctacaatgcccacagaagtgctatactatgtcgggggaatgcctgatacacctatgctccatgattgcatccatattttacgcttcgattttggtttatccgctgtcgctgtcgctggggataaaccccgaattcgtcgaagctccatccggcttccaggcctttggatgctgcccgcgcaatatgttccttgtacttgagtttcgtgtccatgaggattcccaagatattgacatggtccttgggctcaacggtttgtctcttgatagtgaaacacccctgctccggtttgtaagccttgggagcaaggtgtatgatggctgttttgtctgcttcaaaagtcgctccgctccttttctcccagtcgagagcttcattgagagttgcttcaacgccttctcggttgctctgggtgtcggccacgccaggctgcgtatatctgctcttgcaagagcacaagcgcctgctccgcagaccgttgctttcaggctccgaaatggctggtcgggagcaagccgtgtgtctccacaacgtgcgagatcctttctgctaccacggatccaagtatcttgcccagcgtcgcgaggagcgaaattggcctccatgcaaaggtgtagtttctcttgttcggctttttgagcggtatgatcttcgcgtgtctccactgtgtcagcaacatgccttcttccagtgacgcctgaaacaagtcgagaatcctgtgcttgaccgtgggccaggccctatacaaaagtgcgaatttcttctaatctatattctacattctatatggaaggatctatactgactgattcatgcctgatatatctggtataatccgtgtattcatgcatgggtttcaacctatcaaaaggaacgccgaatataaacttcttgcttcctgctacctctgttccttgtcgaaatggttgtcattaacttgtgtaccgaaagaaatgaacatgacgatgggtaagagtctggaaccaagcgaagtaccactcatctggcttccaataggggttgaaacaggtcgtatactaatgggtctcgctctttgcgatggtcccagccactggcgactatcgtcataggcaagccactaggcagcgagatcgcgaccctaatagagaatacccttctggataagtcaagggcttcgttggcggcgaatatcgtacttgcatataatacaagctggacatcggcttttccggagatgttttgaatgacgcgttcgtgttagccatattccatgatcatacgaagggtacccacccgcatgcaacgaccagcttcagggcaccaatacgtgagcccctgcgtatattatgactaacacaaaggtcctgcagcaaagtaggaagtgagccattgcgaggaataagcgtttctccacaaagtgccacacgagtgatatttaccgtacgcctagtgccacattagagcctttcaacttaaatagagtgacaattacagtggcttcccttgcggagaataagcttgccatgagattgagaagtcgtagctcacgtctgcccagtgctcagatgaaagaggctttacgttgataatcttttttattgaggaagccggcgatactgccggtcggccagactgaaagcctccaagcaatgacgaaccctcctaagaatgacacattgagtggatgacttgttcatagtctaggaaggttagccatggtgattaatttctcgctgaaggtgtcttgtttgtccaacaagccttctttagtggttgaatatcaagcgaggccttaccatgacagcggttttttgacacatctcgcaatgggaacgactcgttattggggatagaagagaagtttaagtcaaggttatggccttgggtcgctgactcggaatttggccactgtgctggcacagattgtgcattcaagcttctggtagctaaagagatctggccataggagtgctctgatggtggatgttctgggggggtttgagctaaggctcctggggatgcgagcttcgttggtgcttagcattagtgcttttgcgacataaaccactgatccaaaaccagtaagatgtttccttgcggttcagacctttggtcgacctaccttatttcgcacataggctcctcgcatatgaaagatcgatcactagtgtggattctccgatgacgggcccgacttgatgactgcatggagcccttagtatttgggcaaaacttattcaggatcattccctcacgtctgcaaatgctttctgacagcccgtgtagccacagacgtgcggcttttcacctgtatgagtgcgtatatgtacggtcaaagcactacgttgtatgaacttcttattgcaattttttttcggtacaatgataggggcgttcgttagagtgtattctagtatggcgcgagagatcgcacctgcgatcgaaactctgttagagttggcaggttaatttgggaaaatctgagtggacgttgcccttcgaatagctcgatcgaaagaactgaccttgtcgcagtgaccccaagaacacttgaatttgcgcttgctggcaggagccgtaggaggaatcgttgactgatacgccatagtcctttttttggaagcggatatgacggccatcgatcagagtgaatagtaaagggatagccggcattcaagctcggagcataacatggaaagcaggaaaaaaccagctgagaaaatgggagagataggagaagaagggagattggatctactgctatcattaaatgctagccttgaatggaagtaggcaagatgaatgaactttccaccgacgctttcaatgtccggtctattcccaggccgggaggacaatggtggataccaatagactcggtgcggcgtttgtcagtctataaatccctctccagcacgatatcccaaccaacatcctatgaccaaactgaccaaaaatggactatcccacgttgccttccctaattagccggccacccaggagacagcgtcgggtatcgcaggatgcagaagatcagtccaaattaggaacccatctacagcaatcttcaaacggcacaaacatcgaagccaaggtcggtcatatcctcttcgcaggaaacgaacaaaaacactaatactgcgcagagtccagtgacaccccgtgcccttacggtggagtttatgaaacttttacactacaatgacacactcgttataccagccctcaagctgcttgacttgtactcttccctatgggaatgctacgtaatcaaatctgccgagaaaatgcaatttgaggataagcagcgacagcttcttgaatcaaatgagtggctagcaagcgacagcgacatccttctgcagctctgcgatgaacaggcaatggagttgcgtgatcgaaagcttgcgcttcaggccctttgtaacggtgggttcagccttgcaagcgagcgatccccaagcctaccatgttgatgagccttgatgaggtctcagagttgttgagcgcccatgggcgacaataacatttggatagctctgacatctatttgcgttctctccgaagtatgatcgctgattttagaggaggcccatgcaaccgccggtgagtttccgttgggtttggtgacggggtgtcaacgtttcacgattgttgatacatccgacgcttgagtttcgagaagttagcatcaggccaccaagtccccctaatctgccctgaccttccgttatcgaagatagataaagtcctgctcaggttgcggcattctgtccctctcagccccgttaaatcgctgctttacacacttccatattttccctacagcgttcgacggccagtcatataccagaaatgaacggattggacgagaatggtctgtacccgtttctttgatgggagtttgcgctaatgttaatagaccacgatttggatctcgaccttcacgctatctggtatgaatcttctggcataccgacaccgcctccctgtctagttatgccggtacgagaaatgtatatattggaagcatgttcgtgggaggtaaggttggtgacgacatcgcaaaatacttgggacttagagatgctgttggcaaactggtaaaggaaatcggcgaccccggttacccatttccggatccactacaccactggtgttgtgtataattgtcatcgactacgtgtatgagctagtaggaaagccaacctttggcttgcccccgtttgttaccatcaactacgagcagaaacacggcatttcaggaagttggaccatgcaccgaattggagtaacatctaaaagtgatgaccagatccacgaggctggtgagaccttttgtctattattttaacctctaatccaatattgttttctagcgcaaaaatgatttaacattaagtctaatgtatctctatagcgcaagaaaccatatcgaagatgccgcaagcgtaccacgtacttgacaataattgccagcactttgtggtaaacctcgccgatgcgatcttgcgagatcctcgccacaaatacttgtccgttaaaggccaattcatttctgcacatgaaattggagttcagcctgagaggagcgagccaacacaagatgaacaaaacttcaagggcaagcaagactttcaggaagacggagacatcgaggaaggaaaccccgtcccaatcaccgatcgagatgccgagggtgctgttattgagaacgagaaggaacgcagaaagatgatgttgaagtccatagctgacttcatggctgataacactccacttattcaggaacgcgaggtaatttatcagtagcgtgccggggttagacactagatctttttgggctttgctcaatactaatataatgtagtaatacattcgttctacttatgaaaaagacttgtatatcactacctaggtaatagagtaactatatatgaatggtattgggagcttgtattgagaaccttgaaagaacaaaagcggatttttagtgttgctgatcgcggcgagtccatacatgtcatgtctggccctgtcgcaatgtcggaagagacgtgatgcggcggaatgacttgacagatcgtccgccactgctatttggagaagttttctcacgagctcggaaagatagattcaaaatcacctgtcattgtgacgttagcgataaagatacattgcggaatatccaccaggtcattcatcatattggtgaaactggtgcggatagagtagaccatagccttgatgcagtatatgagctatgattttagattagtaatcggcggcccatataaattgttagcaaagtcgatacagcaatacagagagttgaacaccattgattggaccctacattttacaatacggcccacgccgacagatattcctgtatcagtattaatacagtgacatactcttaagttaatacgttgctctgtcttgtaattgaattggcgacccaagaaactagaacttcccataggactgcaaacaactcaagccccagatctgggagggcctcgggaatttggtactgtacctctgatacagatgggcgctgcagaagtggagaccggtcttagggggttgaattaaagcttatgtttacatggatatttgcatgtactattcctattcgggccgccaccttggcatggctgcattacagccagtagataggcaagatacaagtcaatgaatactagtactggtaccgatggaaaataaaggggaagatgccacggtagcttgaaagatgctctgaggcttgagttcataacctgtcgacaaaacgataaaacgactgaattgaatgatgctcaagatgatcaagaggatcgtctcttcaccccttcggtaaggagggataggacaattctcaccattgcaatcggtaggcgagatcacgtggcgcgagtcgatgacatcccaagcatttgtgtgaccctcaggtgcggtaaattccccactccatcggttggctcttgacgttgccattgcagttcatattccccttggctccaatctttccatcccgggcaaaccgggcaatggaatcattaatgatatcaatcacatcctgtcctccaactgtaaactgcacattcccatcggtcttcgtggcctcaatgccaaacgcacaagtgccgtcggacaggatctcacggtgtgggtgcccgactacctcgtgatcgaagtcggtcgaaccgtcgccctcaatattccggatgatcgtctggcagtcagtcaccaagggcgaagcacccgtcgtttggtcgatgaatgacgagtcctcgcaggtactcttccccggggggatatcgcacgggtagttgtcgctacttcccttgtccgtcgtgtcccacgattggtacgcgcggtcagcgctacacacgggaattcgcatgaacccaggcgtcgtcacgtcaacatcgatcatgttcgatgcggtcattcggtcttccgggtccgccactggcgcgctgtttttcttgccgttgtcgacccaggtgcgtacggaacctttcacgagctgttccttcgtgaggccgccgaattgaccgtccttgagagtctccagccccgggggaactgagaacttgttgtcttgacagacagtttggcagggaccatggtcgccgacgatcttgcattcgcacttctcggcactgtccttgggatacacaatgtagtactgattgtcatcgacgcagacgcccgtggccgccgcgatatcgtcctcgaggtagtcgccatgctggttgccctcgccgcatgcgtggcctgcgttgatgatgaaagtgtaggcatcggattcgcgccagagggccgggattgaccaaccgaagatgcactgttcaatgttggtggtgagagtgctcgtctcgttgtatttctgttcgtccggctcgccttcctcgtatttgccctcgatgagctttccattgcgcatagtctcccacatgacgtcgagcgactcgggcgacccgtcgaagagcttctttaccgacatggttgccgttgcatcccaccccctgatcacctgcgccatgtaggcagagaaatgatcttgatcctctgctgtccaatatgcgtcgtcctccgggagcacatccttggcaattgtcgtcccctgccccaccagcgtcatgacagtatccttggtatcctccaggctaattcctttctcccagaaggccgcctgcttcttcagcatcgtgttgaagaacggcccggcagtaacgagcgtccccagcgtcagcaaatcaatcagcaggaacttccacgaatcatcctctggcggcggaaccggggcaaaggaattctccatatcatccaactggaagctgaccagtgtcgcggcattgtaaagctcatcccggaacttcttgaacatctgctgcatcttcaccagcgagttccagatgagctcggccgcggggccggactcgggcgcgttaaatccattctcgcagccgacgatcgggcactctccgaggatatcctcacactcaatctcgctccccgtgcggagcgtcgtcgataccgagtcaatgaagctgaccttgtttcgcttggagtcagtgtagatccagatcgcctcgacatcctcccatgccgcaagcgcgttcagcgtcttccaccgttcagacggggtgtagtcccacttgtctttactaacgacgtgcgtgcaatccatgtccgtccagttcccatgccgcgtatagttcgtcttcgggtcgttgccgttcaccaccatgcgcttgtacggcttccagtcatccaaggggcccggaggatcattgaatttctgcaaatcactggcccagtccgtggttcctcccaggccccaggcaatgtagagcttggtacgggtctccttggtcgcagcgctcatgtacccaacccactcgatatcatcatagaccaggacgtcgctgttgctgctcgcgtccacgtattgtcgattcacgcgactcgggtcgctcaggatttcttcaatctcggcttcggccaggtacccgcctgtcgcggtgcaccgccccttcttcgcatacgatgtcagccggtctcctgtgaactggcactcggggccccagcagtccgctgaggccatctggaacgcacgtccgtagctcgtcacgccaaccacgaccttatccccgggaacgccagctttggtgatcatggccagcgattggcgcgtctcggtgaggttgacctggctgcgcagacagttacccaactcacagccctcctgcgcgttggggttatgtgcgtcccactgcccgtggagatcatacgtcatgtagacgatataatcgaccacacgggagatctcgcgaatggggaactgtttcagataccagaacgaggcgggcgccgcaatcgccaccgatctgcccggcagcaggttcttgagaatcaccaggaacgccagatagttcggcccgtcctcctcgcttcccgggtcgaagctaggcagatccggcgcgccagggtattcccagtcaatgtcgacgccatcgaggtcgttgtctttaatgaagttggcgatctttgtggccatgttcagccggttcgcgggtttcaccccgttacggaagatctggtacgtctccgggaaggtggaaaaatcccagccgccaaaggacaggatgcgtttcactttggggaggcgtcggaattcgttaaactggtaagcggaaagctcatcgcccacggtaacatcatagttctcgtccagcaccccgaagccaaaatgtaggtgggtgtacttgtccgtgtcgatctgcgaggcatcctgatacagacattcacgcttgaagcagtacccctggtagtaggccagcttgatcgcgccagtaccgtctccctttacaatatccatgccacagttagagatacagccgtacgtgtccggctccgcggtgccgggggcaccggtgttggtatccacacagaaatccggggtaatgccgcactgaccccagatattgcagcaggcgttcagtgggcacgggttcatatcagcaagatctgttccgtcagtgggcggctcagatccaggcttctgcgggccacagacggcgttggcaatcgggtcagggaacggtggtgaacccttgctcaggcacatgatggtgtccttaaacagggggtcacaccccgaccagccccaggtgttctggttgtattcatccagctcgtccatggtcagggcgtactcggcgctgatggtgctgcagtcttcgtctttctggaccttatgcgccttgcacgaaccatcttcgttgggtatgggacggaaatcggggaggtcgccggaagaacagcagacgtgctgcttgacccttagcgacgtgcagaagtctgagccagggttatacttctgcaagtcagagacggatatgccgcacttggcagcgaggtccccgcatagattacctgcctcgacctggacagtgctgcactcgtctgctctgtggatcagatacctggccgcgaggctgggggagccgacgctgtggtttgcgctgctcgagctgagaagcggcgtgctgaactgcgccgtgccagcaaacgtggtggagccggcatacgagagacacgtcgcgttggtccaagaccgcatggccgtctggatcgctgagaaggtgccattactggtcaccatgactccgaaaatgtgcgaggcgtcatactctggctgacagagctgcatcgccaaagttggcgatgacacgttgaaattggcaagattatcttcaaacaccttcagtgccgactcggtcagcccctggttcagcaaaccctgtccaatgtatatgcccagggtagccgaaccggactggccgtatatgataaatggattgtcgtcggcagccccgtgtccgcgatcaacatacttgcggatctgcttgacaatcgacttaatcccggaggtcgcaagcccatagccctcctcccaccaaccaacctcgaattccacgttgaccgactccgtctccgccgccgctatccgcatcgtctcacgggggatcatcgagaaatccggcccgaaggacgagcacgcctggatgcggtgggagacgcccgcctcgtcgaccgggtcgtggagagagaagtcatagaacatggtctggtcgcatcgtttgatctgtcggaaatcgccatacaccgaccagttcccagtattgggaccggcaacgctgcatcgctcgggacagagggagctgctgccacggtagccgggactggcgccggttttggcaccatgcaaagcatcaccggtggttgccagcgccagcaaactggcgacgcccagggccgcttcgaatagtgaccgagccaccaccattccgacaaggctggggtaaaaaaaaacgaaagaaaaagagaggaaaaagagaaaaagaagagaaacaaagagaaacaaagagagatcagtattgaacgaaagattaaaagaatgaacggttgaagaactaaaaacaaacaatgagtgacggagggtaaagggaatttttatcatctacgcccatacatactgaatgggcaacgcttttatacagcaatcattgtacatcccgactcggcccatctcgatcgctcgaatgctcgtcccggacacctcgtgtaagcctggactgtggccccggtaatccttctctttttacctttgctccgcctgattgttacatcgcctcattctcggacgacccaagcgagatgaaatccatatgaagactccttggcagacatgccgaagcacccggatgagccatgcctcggagcgcgcgaagaaactcccatcccacctgacgaaaagcaacatgggggccatccttggcgcaatattagccaagattccagcgacgtccagacagggcatgcgttgcatgttaagagatagaccgggacgactaggatattgactcgccaccaggttttgggggcgggtgaccaacaagccaccggcggatggatgttggtatctcatttaacctgcatgcgccaagacattgatatttgatggcttacgatggaacctatcacgaatctaagaggttggtatttccggggcaccgaatcttcgcggatcccaggtacgggtggagacgctagcctactgcccaagccaggcgggtcctcaccgggcgaaaacatgtggttgagaggtgagaaaataaatggcttagggtatactactcgtcacggctgctactactactagctgcgtccagtagcgcggccgacacgaagatgcaccgggacttgcgaagaaaacaagtgaattggaaaacactatctgaaggccaacgaaagaacggcaaactccgtacaatggcagtaggttacaggaaagcaccggctcagaacggcgcgagcaggaagccaacggccccaaagactgccaggaaacacgacagtccaacaaccaccaggccctgtgccgcattctcattcacagggcagtcatcgggaggattcgcgctcttgcacaatctcgcttgccacgaggcctccatgctctcgaccacggcctcgctgacatcgatgcgacagggattaggcgagggcgtcggcgtgggcgtgggcgagaaatccaccaccgcacagtcgcggccgttggaccattcttcgcccgcggggacccggatggtgtggttagtgacggtgatggggacggcaaattcatcggggcaggagtctcgcgccgtgtccgtgacgatgtcggctggcgccccgtcttcctcgatcgtgaaccaggtcgaccaaccggtggagttggtgatcatctccgcgcgcgggaacatgctggtgttgaagagggcaaactcgttgcagctcttccagtggacgttccaggcgacccgccagcggccgggggtgcggaattcggagaagtaggcatagaagaaatacgggtctttgctggtgttgttggtccagtcgatctctgtcggccagtgcacgatatcgctcatgttgttcgcgttccggatcatgaacgagatgtccaggtcgacgagcggcgccagctcggggttctggaccccaaagactacggggaaccactcggtgggcgtataagtcttgttgcgggggaagaggaggtccgtctcgagcatgcctgatgcgtgcaccataatggcccccaggcaggtggcgagcatccagctgctcgcttgggaagaaggcatggtgtggggggagctactcgagaccgaaatgagggaatgcccacaatggtcactcggggtgcaaaaaagcagcaatttactttataccggcaggcccggacaaaccaggggcgggcctggggcttgcttgcatgattcaggggaaactcggttatatcctagcactaacgcgcagtgcagactagagtagcgctgcaacgtctcgtgcgttagtggtcttggctgctgcgtgagggcatcgagcggagtggccagcgagggctcggcatgttggtagcggcacttggcggctcggcggtccagggtgttgatccccccagactcgatcttggccgtggtgggctgtatgccggagtaagcgaagccgaggcaccaagacgcccagccaatgttgcttgggtcgtttttgagcctgtcgcttggcacccatctggtcagcgtttagcctccacgaggaccgaaaacaccacccatctccgactgcaacccgtccatccgtcgagccctccactggctcaactattctcgaaccagtagggaacgcagggcgccaccgcacgccaggatcatgggttgtctccgcgacgagccgagatgtcccccgatccaggcccaggtcgctctggagaggtatataaacgaggcagatatcggaagaatccctcctcgtatcacacatccttgtcaagaaactctcccccgtcccagtcaccatgcactttccccagcttcttgtcgccggactcgttccggccgtcgcctcggcccgggctctgtctcgacgcgccgtcgattgcagcttcaccacaagtccgtccagtggtgataagtgcgacagctttgcgagcagttggggtctcacggtcgacgacctgaaggccatgaaccctggcatcagctgcccgaacctcgacaccagcaagttttactgtgtgatcggtacggtcactggggagcccgagcccaccaccaccaccaccactaccaccgcgccgaccgtcactaatgagcccgccatgccgggcatcgtcgacgactgcgacgggttctacaaggtgtcgccaggcgacgaatgcgacaccattgctaccgaacacgggatcagcaaagcccaattcctggagtggaacacctcggtcaacgaccgtaagtctacttatttctcccgggtctcactccttctatgtcccttccccatgcaaagacagacccctcttagcaaaggcccaagtctaactaacgctctcccgttctccaacccacagaatgctccaacctctggctcgactactacgtgtgcgtgcacgttcccggcgccgccactggaccgcagccgcagatgcccgggatcatcagcagctgtcagaagttctacaaggtgaagtccggagacagctgctacacgatcctgcaagagtcggggacggatctgtccaatttccggaagtggaatactaagattgatgcctcgtgcagcaatctctgggtcgattactatgtctgtgttagtgtgtagtctgttgtcttcacggatgctgtccagtcggctcggtcgactacaactgtgcattatgttggtgggactggaaccccacatgccaatacatgccacgaccgtggccccgataggattagttcatatcaacactcagcaaacatcggctcagtttagcctctggccccgaccctctcgtatttacccaaattacatccgctgtagaacgggagggacatctggagggacacatgacggagtccatccataaataatgtagatactaattccatgaggcataccgtttcaagtctgatattatggaatctatgttcttcagtccgctataacggaagcaggagcatatacacaattagaggaacttggagacattcatgtatgtatgatgttcaacggaagattttataccagcctgttcggtgaatcatacccttccggacgacccttgggccgcacaggaagcatttcatcaacgacacgtcgtacttcttcaacatgcctgaaatagacgccgtacaacttaatggaagtaactggcaggacctaaatcgtctggtggcccaaggacggttagccttcatccacgacgacgacgactgatgatcgcgggaccgcaagtgtgcctggctggccgaacgatacgcgggatctgcccttgactgggtagtcaccgcgtattcggaccacccggaatacttcgtacattacgataccttcgttaccgaaacgcgcaacgccttcggaatcgccgataacaacaccatggccctcctgagacatgaactcgaccagctccgatggagcctcgatgtcccggtggtcttcgccgagtttgaccagcttacccagagccttggcatcacgagccacgacgttcgggttctgatggtggaacaaaaactggcccacttcatcagaaccctgttttcccagcaggtactatctttctccaattacgaaactataagagaaaggctcaactgcatgtgggccagagacccgaatagaagtgccgcctcacacgccaaagccaagaagccacgatgtggctattgtggaaagaaaggacacaacgtcggagaccgcagggcgaaaaactagtcacgcaccgctaggacgtgtggacgccagcgcgtgctcacgccaatacagcaacagcaaagccaggagcaagtgaactcctggctgacaaataaagtcatcgaaccaatcaaaacccccgcactcacgaacaacctcgccctggtgtctaaaaaggacgggcgtgtccgggtgtgcgtcgattgtacccccgccaatgaagtaacgaaagatttcgactggcacttgccgcgcctccaagacgtccgatatcgcacccagggtaaaagctggtttgcgcgcattgatttggaggacgcgtttttccgcatcggggtgccagccagatccaggcaacttacggcctttacggttggggggcaaacatacaaattccgacgcatgcccttgggcttgaaaactgccccggcagtctttcagcggttcatggatcacggactctcggagttcgccgatgcaatttggtacatagatgacattttaattacagccacctccggtcagaactcggctgaaggaaatgcgctgcacagtgaatgaacaaatcgatcaccgagcgccgatctctgcgaatcggaactttccgcgctctccgccccaatcacaaaagcagaaagaagcagcacagagcggcccaacgtggaccgaacgcaaggcaagcaacataacaaatcggggcctgagcaaaaggctcgagcgcacgaaaaccaaacataagagagtcctcttcccccttacttttccatagaatctcaaaaagcggttattatttcctgggagctctaaccacatttgtcgggatacgcgcgaggcatacacaatgggtggagatacgatatgcgggactcacatcgcatctgggatgtatacgcgactttccccctacaactgggcctcaaaatccgagaaaccggcaaataattcatatagcagtgtagcaatagagcctaggggacccacttcagggttgaacataccacatgtcgtatccagagcattcggtcttgaagctcatgaaccctacccctggctgttcagacatcggccccgagtttgatcgcctgaaggacgtcagggcgatatctctcaatgcaaaacgtgtggcttttgtcgaaaaggctcattcatcgcttcagtcacgaggacgtttcaagcagcgggattgctacaagaggtctctccttcattatgctgctatggggaactatacaaacccccttctatatcttctgcaaagcaagccggttgttgattctcgtgaccagtgggggcggacagcactctcctgggctgctgagtacggctcattggctgtagcgaatattctacttgagcaaggggcaaacctcaatgcctcggattatgagggtggcacaccgttggcatggctgatacacgccggcaaccctgaaatgataaacatagcggctactgaggcttacctaagagagaggggcgcgaaagaaatcaaattgagaggcatcaagtgggcctgggttagggttttgagttattctcgtttactccgatacattcgcccccgtatataaggcccccgatgaatgggaaagccgtttctatactatatcaatacgtatattagatggacgtcataactgaggcagccggaaagcactgtggcgagaggttgggccatctgatttcacactcatgttttctttcgtgtaaatttgctctcgttgaagtagagacaaaaagcaagcaagtttatttgagcataatagatatgccgatatgtatttcattagtaaaaaccctagtcttacctggcgatacagagctgtaggctaagggtacacgtactcgtttccactttagcccgtagcgaggctggtacattcgaccccgaactgtctactagaaggccttgacttcatgattctcgtactggccatattatctaccgcttcaagtaaaactaggtcttgggaacttcgttcagtatggaaaaggccctgagcgatgtttgggagcaggagaagacgacatattgattgtctattctgttgagactgtaaaagcaagccggcttgttagtaaaataaatagaaacagtgatgcgactataatgtgtgtaattatatatatatatgatcacaaaatatgttgaacctacaaatccactcacattatactgtctactagtctcaccattaaattataataaaagcaatatatctaataaattatataacaagatacaccgttattaggttcgattacctactataccagtggttatggcggtaggtgacagtgacagacgtaaatcgataaatccacaagttgaagttgaaccccctattcaggaaacttacataatctgagggtggcatggaccgatggcaaggcctagacgttgaccacctttttcaccgcccgaccattcaccaccacgctcatcactacgttcatcaccacaaacacacacatcaactcacacatcaacacaaatcaccactcacatcaccacacacatccatacgggaggcaccctgtcggcagtatgggctattggaaataatgccatttgcaaagttcatcattggagccccgataccacctcagaaagcgaaaccatcaaattcgttcaaaaaatggcaccccaggtacagtacgtcccgaaactggtgcaaccgcctacatttcgattgttccacaaatcctagttgccaagacacgctagtctatatcaagagtttttccggagtatccttgtcagcggggtacgtattatttggtgcgaatagtaacttgacatacagcggaatgtattgtaatttaatacaagtgacaactcgatacccatcttgatactcatcgccccttgcacggagatcttgaacgattaactacagtaccgtgtggcaagttcgaaactaatcttgctatttgacgaatacaaccttttcttttttttttgagatttagtgcacaccttacttaatgtacctgatctgcttcttagtagtatttaaaagctgaatacacaaacccgaaatagtctagctgctatgtctctcagtggtattttatttgatggtacgtatgtaagtagctaaagttgaaaacggaattccgtacctacactcaacagcttttgttccatccgtgctttaaccgaaccaaaccaccttatttcttgttcgagcgctttgttgctagtcagtatttgtttcataatcgctttaaatagctcgcttactctgatccgtcacagtgacatctctattagcagcaaagaccacatcctcagaaagctgccaggacctagtagcataggtcgtataaggttcaatactaactatttttccagtgaaattctttctagtctcgccggggcaaagtaaagtcaaagattcatcagtattattttcatcatagagtgtcaatttcacatcggtctcatttgacactgtgatgttgtcgttgataaactttgctgtaggcatggtaggagtcaatatccgtgtttggtacaacgttgtaagggctcgatgaggaatccgatagtgaagcagtgtcttgtggaaattcatggtgctgctaaaaatcgttgcgggcattatgggtgggactccatatatattgaggtggattctaaaacgtcataatgatcatcagctgctgcatacagtattgaaacactagatacatgatgtatcactgagcgtaaagtaccgtattgataatctaacaggaatattgatactccgggcttattccaattacggtatagtatatcttggcattagggaataagagacaatcgaagagtgtaatggttgcaccggtttcgggacgtactatacctatacctgaagtcatcacttcttgggtcgatggggagcgatcttgaacacatcaactcacatcaccacacacatcaccacacatcaccacacatcaactcacctcaccactcatatcaccacacacaccacacacatcaccactcacatcaacactcacatcaacactcacatcgccactaacggttcaacgcaacaagcattccaagacaacactctcatctctgtttgcctacatctgaatggaagatgccaatttctttgtagcgaggaagctattggattgcaagactatcaagggaacggaatgggaaatacatcctttgatgatgaagacgccttcagtttttacattatgattttggctattgaattggcaaagatctaactaggactccttctatgtatccaatgatgacccttcgggacaatgaacagatgatgaagatgttgcgcaggtctttgcttctccgaatactcttggaacactcgaatactggtccctagcaccacgaagaggtgcctgcacgggctagaggcgcttgttgtcgcagatgtccctgcgaggcgctttgttgacgcagggcctaggctgcagagaacttggtaatgcagcggtctcctgcagagaacttggtaatgcagcggtctcctgcagagaacttgttaacgcagcggtctcctgcgaggattgttgttgacgcagacctatcctgcgaagcaccctcttacatcgctgggctcgtggcagcgatagccgtagccacggagacgctcaagcccgcaggcaagagagggacattgtgacacagcggaacatcggaatgtgaggactgaagtcctgattttttttggactgggaatccagctccttttatatttctccggctatatctctataatggaaccacttgtgcagatggtagcgagaaccactctcgttgataagcgttgaagcgatttgaacgatgttgaaggggtgtttggagactttgtggcctacagagtcaagcctcgacctggaataattcctcttaaaattgtgcgttgagtgtggtgaaccactttcatcggatgttaagaagagagtaataccgtaaaagtatgatttgtacatatcattgaattttcaaagaaatcgcttaacgcgcttatatactacgtctcctagttttaaccactgttaccgtttctttcatgagggttgaagtgcttcgacagatgccgaaataatgggctggagatagccgacggaaacgctgtgctgtacctgcggttggccggaggaccttttggtctcactagaaccaatcctgtctatctttaggcttgcgccgctgaatgttatttctttcctttctacttatagctgacttaggttgtctttactaaaatctctactccctgggcgcgtaggccttggcatacttgcaatctcaggatgaagattgtctttctttggcatgatagccaaaaagggcccagacctttgaaaagctcagataagaaactgggtctagtttctaggataaccatgtgaactgatacaactaaggcccacgagctaggctcttgtgatcgccaccccctcgcaagattgtaacgctactatcacactgatgagaccctggagacaaatagcacccgacgggctaatcaaacaccacgcgagaatttagatagacacaggtagggttctgcgatacagatcttagcggagacccacgggatagtagatcagggaggttctatttgtggagagaaaatggaaacaattgcaaaggtccagacacgatctataagcctaaagttggccgctgttagtatccgatggaacgggagattgttgcctaggaggtactgctggggcaggtgagtatttggaatagcacgtagactttggcgatataatggtaagctataacccgatccgtggttgtgttcttggtcgcagttatgagaaggtaagttcccctatcaagtggcaagctgaactttgcctatctggtctgtaggacgttctagaagctacgtatcttctcctgcaataagcctttctccgatgattattgctctctttggactataacaacacttcctctccatctctttaaatctaccgctatttcaataactctagcagacggtaggctacaactcgatccgtggttgtgttcacttggtcgcagtgaagagaaagtaaattcccctgtcaagtggcaagcagaactttgcctatctggtctgtagaacgttctagaagctacgtatcttctcctgcaataagcctttctccgatgattattgctctctttggactataacaacacttcctctctatctcttcaaatctaccgctatttcaataactctagtagatggcttgtaaagaactataccaattatggacaaaaccacatgagcttaaataaaatgcctccgttttactaaaaccgattggccctggacaatatttcgatgtaggccggccctcctgcggccctaaaccttatttcaatcgatctgcacatcttgatcaagatgctgaatttaaagaaactttctaataaaatgttggccttaccgcagtaaatttatcctatataccgcccggcggagattatattgtttctattctagttctcattttttgggctgtaaggttcagtcacgaacagaccagaaagtgggcagaaacctaggcttaaattcttcattaaaaccgcattctctcactgagcgagcatttccatagtttatcacaacaaactctcgaaatgatttatagtcccgttcgtggttccgcagtctgtgtcaaacttgatttccttgtgacttacgcgtgggtcgaaagcagatcggacgcttcattccaaagatcactccgctcccaaccaccgatccaattaaatccaagcggacatgtttccttaggctaacaaaaacccatatatttttagtcttactaccctgtcctatctgcttataggaaaactcatagtactgtgaatccttatacactatccgcagtattttgcaggccatataggccatgcccctggtttagaatgacaaggacgaaactatgtagctgggcctgctcagaggcaccacgatcatactcgaatgttcaccttgactttggaactttcttactactgttataattccaaataagggtgattgctccttcctatataaaatccatggagtgatttatatctcttatactaatattcattgtcgagtaagcacagcctttatggtaataacatatacctggactattttatcgaaatagttagccactgttccttcgatatagcaatatagcgctccgtcgataatatactgctagtgtagacattctgttcgcctgtatctcagtttcctagcggtatagacacgatgtacatagtcctacatctaggacgacgatcgtgttctttgaggtgagtacggaagcggtgttagcgttacgcagcctatggtaaaaggtcagcctcttatataggaagaataaaagtatttcatacatattttcgagtgtgccgtttgagctggtttatcgctgtcgccagactggcaagggttagccgctagaattgtttgaaaccatttgttaatgttcctttgggtagaggtattgtctggcagagttaactgtgaaccgatattgactagcgagcgctgtatatcacctaggcgcttttgttttcctgaacgaccggggactttggcgctagtacgacgctgcttctgcagaatatagtactttttcccttataaagactcaacgcttcgatccacctaatattctttataatatatgtcagagagggctttccacgataggccccgatgggaatccagccaagagagaaggtttttctcttcctgttctagccagctgtatgtgctacgtagggacatagtgatgctcgggtaagttacaaaagtgggaagaacggttgaataaaacagtagaaagtgaattcgaagaggaagggttattgagtttaaaagattatagtattgtacataaatatagcgattgcgtttatgagccatggcctagcttagtgaatttataccagactcttatgactcgccctagcttaagtttctgaagtccagaagccttcaacttttgatatactatatttcgttaagaattaatcaataacgttaaacagccaccgtatacctattgataatatcatatggtttcactggttcgttgaaatatatcagactcttagtaagccatatagtaatcgaatagatatctatgtatagaatcagaatgcatgggtgaaaaatgtgtgcgcttataattcccgttatagtaagtaagcataacacttaattctagtcctgcgatataacttgctataaagccggagtgctttcttctatcacacttaaccagaagtaggaatacttatcacctcagtgtaactcagacgcagatataggcggaattcgaaaagcctcgcgccctcttcgatgaccagactttcggagcagattgcaacgtatattgtctttgttatccttagagtctaaggataccggcagtgtgtctagtaccgctatagaggatacaataagggacgagttaccttaggaagaatacgactctggcgaccaggaaaatagtgacatagctgataagagtgagtaagaagctatacgatagcagagaactgtatttggatataaaacggacttggaaatacgtaggcaaactcagctatctagagatagcaatacggttgctcttgaacgcctgatagagtaagtataatcctatatggatataattaagaattggcctgctaataatatctagactagataaccgaatagggtcagctgctgtcgatactaagtaagaatgtaaagtactaaccgtctctgtaggtctattaagcgcttattgtatgaccaagctacctagaatgaaactatttgtaacgatctagtcgatatcttaggccgattggcaatcgtcgagactgaggtatagaagttgaatagataaggtacaaataaatctatagagggccagaagaccgggcgatccctgcgtcagcagcagtgatgtgacccaaactgtgttttgatatctaactagatattccagagtaaggtataaatctgtgttagtcttaagttgtagatatgattattttactgactgaaaatattactgaatatagatactcttattatagatactaagttggagggttactggaaaaggtctgattaacctaatacgagctggtactagacgagctatatatagtttgtcgttgtatttaggtcttcgaattttattaatacttgcctaggttgtatatactaaagctatcttacccgagccgagtagctatagtcgtgacctactatatataaacgagtactttaagccttttattagttctactattgtagatgatttgtactatctagtctagtataattgtatacggtttatataactggaaatatgccctaaaggctaaagccacagtagtatataagaattatatgctatataaagatgattgtatattggttgcgactattaaggtgcaatccttcgcgattaatactagtagagtagtttaatatacctggtagttgagcaattgctatttgtgattgagttagattaggatatactacggcaagctttagattaaggaatgagaagagataataactatagtgcgtaagagaagcgggggtttctccattagacctatagtaataaggcctagcattgtcctaatcggactattaagatacattccctttacatagactataataaatatcaattccacagaccagtgtgccaaggtctttcccatttctaaagtgtatctaagcggtgtgatactaaatctattccgactgcgtctccacaagtatcagtcccacctacttattacatttcttaatgtataaaaaacaattaaggagtctggaattagtcggcctagagagtggtaaacctgccgttaacctgtgccgaatactgtattgagacgcctgtgcttactcgtactagtggttcttagaccaaggcgcccagcgatattcttcggagtaagaaattggtaatatatatacttcgtaatcactactcttagaatggtttggtaataatgttgcaggaagcctattcataagctatctgtgcgttaactctattaaaaaggcaattctatctataggaaattaagacccagtaagtctaacgcagatattcgttcaaatgagagatctgaattggttggtcgcagacggctcctactggctaggaagtgggacattcaattcagagaggctaaggagggtattgtggccctgagtaactgggccgctttgctcggcctagtccgcgtggatcactccggagcccggcaaataggatgccagtcgtctgttctggagggcatcgaccgtgttccaaaatcgagtggtcgtcgacaccaggtctccgtgtacctgatctagaaccagctgaatatcattctatggtacctaatcctatagagcggtattcgtagactctagctgctgctgtaactcacagatcttgtgcctaacccgctgactgttagctaatgccgcatctcttactgctatagccagctgcaatttcgaagtttcttcggttttctcggctttaggttgttctagcaattggcaatgtttatatctttcctcttctctctcctcctgtgctttttggatctcttccttaacgatacttatcatataaagatatttcctataggacactttattatgtttccgcctagggtttcgtgtttttgtgatagaggatgcctagtatagtcagttagaagtacgttaaggtagttactagggcaataggggcaatgttagccaaggaaaatccagaaaatattgtagaaggtagagattggtaccgtatgcttatgcaacccagtcgccggtttaagagggttccgattgtgtttcgatctagactgagtagaccgaaggggataataggaaggcacagcacgcagctgtactttactacagtggtctgcctattcccagaaagccttataattctttgccatactaagtgtactcgattgtaagatgaacaatagcgcaacgagatatagaatattaaaagtaatataagaagtgagtttcgagaagctgaattatatagtacgaggagacccaagtgtaggacttaaatccgaatgaaaccgctcttactcctgcctaggacgtatgccaaataagggttataatcctaagaaaactgagcactgggcattagtgcgaacgtacaaaatacctaccgctcaattatagagggtgcgagctataggtccgtataaatatatagttgttacatacaaccctgtcttataatagaaaggaccaatcggttacatcccatctaaagtgtagagctaagagtaaaatgtcatctttcaaatgttttgtgaagtttgccgactcctaggactatctattagttagccctagaaaatagcggcgttgtctttccgaattaacagttctaagtttcctgtccctatacgtctagattccttaataagccgttacttgagtcacaggggagaggcatttcttacggctaagacttagtagtaagggtatcaatctagtatccaccatagtatagatatgcttagagggataggaacctctagtgctacgaatcaagcggcagtcatagcaggtatataagcatgttataattatcagtttaagctacagtataggtctcggccttcactagttaagagttctgctatcaagtacctaactcgagactcctatagctcacttccctagtagcctacgtttatagtctatagatactatatatcacgaggccggtattagcttaaatctagataaagttggtaccaaattgtaaggtgtattattggaggtatatattcactgttgcctttaacgcataacaactagggtactcagtaggctattagcgcatatgggatctctgccgcgtactcccgttaatccaagatctcgctcgctaccttatagatgccattggctaacgattggatatcgcgtgtactaacttcgatctcaattccctccgtttataataagtttaatatccgccttactctagcgattcccgctttcgcctctgttaacttattatacagtttcttattatacgaccgaagaatttgtatatcgtggcggagttcattagcctcagcccagaccgtataacttttattaagacagtcatttaatcgggcataagtgcgttccaactcgatttctatgctactattagcagccttaagcttagaaatctctgctataaaagaaccatccattccgttactaaaactctccacctccaggctctatcagcaatgctgtatcaataaggatatctagtaatactcacctcccttagaatacagcttgtatttgactataagtgtcccaacgcatacggggaaatagcctcgattgaatggccgatcttattacaaattttccggtaaagataaatcttaccgctacttaagctagatttaagtatactagcatttgcgctcatgacggactaagcgtatctatcttcaggtcgcggttggagacagacttttttaggagcgactatgatgccaagtcggttatctaggagtattagctgagttattattagtagggggccacgggtatatatattggccgctagggcttcttaacattgctgattcagttttaagcgcttctcgttactacgcttaggtatcgtagggtaccttcagcactcaaagaatatcaagggaatagggacgcgggtatttagaatataattcggaactgacccttccgccaaaataccggcttaatataggatcgataattcgttctttctcaagtcgaaagtggtatccgtaagtggggcctaccagtatccattaacatagggtaaatgaagtttcagctaacttagattagttaagatttggttgaaagtcgggtataacttttattgagacctcattaagtaaactgggctactgaaaaaaacacaggaaaaagtaacctcaatttctattcaaatatatcctcaatcactaagttttggtcggcaaacgctggaattaatttggttagggcgtctttgcgctgccaaagatttctgccttctaaggtgccggcggaactgatagtaacttaatagagggtggaaagctgatacaactgagcagactgtcgggctcgctaacaacatccccaaagatccagcaaaacatatatataataggcagggttggggcgactctatgtcttttgtgccatctatctgttaaaattgcaatgactccaacagctcgccggccccgccgccaaagactagccagcgcccatgatctgacgccattactgtgcgacccctcaaagcttctgctatcaaagatgatcactcgccatgccggtcgtaacattcgcactgactcatcgagcccaccttcgcagcgagccaagaaggttcttgaaatgagggttcatcatcgatttcatggctcgcacgttacgttcctagaaggacagcctggcagaccccaaaggaaaggtgccaaagaaaccccacgccggaagggagcaaattcgcagcgagaggcaattcgattggattggatgcggcgacttcgtcccaagccccatagacgttgctagatcggacaaggatagggcagacatgaagcccagagggtggcatgccgcaaccactaatttcgtcatatcgttgaatagattaaattgactttcaagacactgaggatgacaatgcagtgcgtgatgaagtagcccgtagaaatggactctatgtaggggattgctcagctaggcatcctatcgattggtatacgcaaaaattgccagtatacaaaaggatattctctacgcttttatgatgcctgttgtatacaattgcaatacaagtgtctactgtagaatagtagaattcttggaattggggcgcatagaacgggccagaagaaatgtacggatttaatactgattggttgcacgatatgtgtgccattatccgtgccgttctcgaaattatatacagagttcaatgtatgtttctacgcaagggactctcagaatacatattcttcaaagcgtgtatcaccaaattgctctgagagagatcatgctattctacatgcactgaagtaaggggaacggagtttacgctgtagccagagttcatggggcgtcatcttttatttttctttaactaatttagacttgaaaacgatccgttgtgtgattgattcttgcggatattctatcttttagagacagcacaaatagcaacctgtcaacaaaagaaggtcgccattttactagtgcgcccgaagaacattcagcaccccctctgcctgatgataaggctctcaacgaccttactaagcccatcccctatttattctgcactttctatagtatacaagaatcacactctcaagtacccgattggctatgcccgtactagtccgtactgtaacgaccacgttccgacacaacctcctggtttcagtgatcttatctgagtcatccgtccagtggcatccacataccataagctagtagataagaaaggacccacctatttggctcacgggattgactgcaaggacaacgcccagatggcgataatgaccagttcgacctatttagtgtcagcattattagtataacggtataacgtgggaatccgcgattacctccaatgcaatcatccacaatctctccaacataccaatgacagcaatcacaagcaaaagaagtgctattgcagagagataacacgagatacaccgcaacttagctcgaccagcagttgactgttaaaataaacaccaataccatacaactacacaaaggtaatccgctaagagaatatagaggctacccagataagcagatttcaaaaggaaggttccaacgtgagagactactattttcgccaaagctaaagccacagagaaagaagggcatataaaacgcagtaatcgaggtatgagtgggttttcgcgctgctggaagattatgcgaatgtacttcagcattattagctcaaaacgaagacactgtatataaccgagttcggtgtactatcaacttaccgcttatagtggtgggaatattggtataatccaaaagagtacttgactctatactggaaacctattactccagaacaacctagtaaggatagcaaaggaactataagacaaggcatatagcgctaaatcgactttataccaccgccagcgtgattagatacaatataaaagaaatagtcttccaaagttgagaagtagaagaatagtcaccaagacggatctgatgatattttgtgaaaccacaactatacttaactgccagttaatatccttatttgaacgaggtcttgagatttatatactgtgacagagacatattggctaggtaatagtggataaattcctaggatatcttcatttggctctaggattttcttatactgagtttcctacctataaaaaagcagctgccctcaatcttataacactaaaggttaactgaggattctcagttaaggcttcggggcaacactcttactcttttactacgcagacctgagaaagactacatttaaagcttacagtatagtttctgatttaacttgcattatataagaccatatttacaagggccaatcacagttgcagtatcctgcttttatatagatatcgaggatatgcagaggtagtatatacatttataaatgcctaactcaatttctagagagtactgccattctctcaggactcagtcttcggacccgtagaaaaagtaaagtatgtgctcgctacaatatacctggaagtcacacaatattttaataaaacagctttacctttaaaataactggaattagctatagagtacacagtgtcttgaatgagtatatcctaggggcagtttttatataccgcggattctccgtatcagtttcagtagcctatggttgcctgccctagacggactcattagcttattgtgattactccttaggccgaaaccataactaacccttacttaagacctatgatttaataatgttttatcatcggcaaaatttaatatatatctcctttccaaagggtactaggatcagaaaatgcggagactagggttataatatccgttcaccgtcatgatagtatcttgctattcgtcggtactctatataacggggacaaatggatagctatatcactaaactattaaagtaagcgaaatatactctatttatgggttttaatcgcttataattttcactggcggtctaaagtacatatatattgtattggccgataagtagttattctaatagcgtgaagttaccatattagcaataatatatagactatatttccattttctcacttatatcagaaggttccagataataggttatataaggtatcgttaattggttcctataatctatagtatacaatatgcaaataaacgtcgatagatgtgacagaaatacttctactatttcaggcaaagtcaatccacttagaatgtaggactttttaaatcggccacgtttctccttattcctcgaaaaaatatacgcagactttcctaactaagaaacgaaagttaataatataaagaagagataataataaaatcgaaaacagtatcgggatcaccgcgacgcagacatttcatatggtgaataagtcatacacttgaatgttaacggcttacctagacagtagaccgggaataaaccgaacgatagataatatgacatgacgtttcatgtatacgagcctttgtagtccactattactataattccatacactcgatatcaagatatataaggaattgctacctataataccgctttagaatactctacgaggctgtatatcaagattaagtatatactatagagactgggctgccagaactagaccattccaattttcttaagagggcgcaaagtgtacagagtataaccgcagaggttgagaaatactagtctgccgaatacagtggctaatagagagggagcgtggagcagctcggccaatatatgaatagacggtactaaggctaacaggaccactgaggtaaattaaagagacaatcgggcggaaaatgcccctatatccatatccttgagatagccgtccgagaggcttccaaccgcgattattataaaagccgatacacacctaagttatagcaatggttaggctaggaagagaaaagcgatcgtaggaagagcggcggtccagaccaggaataaaccaccaaactatacagaatcttgctctttcctcattttctccttttagaatacactaaagcaattctgaaagataatatacagatactatatagcacttcctctactaaacgccatcactgttagagcgtataggattgactgttaagataaggggaaatggaagatcaagaacataagtagataaatgataaagtatgagaatctaagcgtgcctataataatacctatggcgcagttacacaggtttcggtaatcgagcgtatccattatatagagttggggtaagtaccggccctcttaaggcagtatccctcaggcgagcatttggctttatagataagagtagagctcagtctttacttgttaaccgtgggttaggtattacaaaaatatatatattagaataatgataggtacaatgttaatcaccagaacagtaaggaactattatatctgtaataaccacccaccttaacggccggcgcctcagaagtgaccatatttatattatattactagaaactctttttttgcctcattaatattcaatctaaccaaccgactgacagtcctccctaactatataattggtctctcttattatacaaatgtaagacctaagagttcgtgattctacctctcttccataatagcactatggaagatattatatagattgtacgctagatcggttaacaacaagcacataatatatattatcgcgattgctattccctctttaagctactctaagagcttacagaatatacgtttaccgaactacaaagactttacaaatccggcactgagcgctcaaccaattctatctatcaacttctccgaaattatcagaatataatctataatctagttgaaagagtatgcgaagcctaagcggaatacaaggagttctgctcagtgaatgaatcacactcagcacgcgttgtcttcgagcctatcaggagaatgtacaccgacccacaagcctcattgcagggtctaagataatggtagaactactatcctagtatcgtcgcctagggagatggacgagcacaactggttactctactatagagatattttctaaggcagaatttctgtaattctgtatagccgcgtgaaaatcataatgtactttatataccacagtatttctctctaaaagctcatataccatataggagcccaccaatacaaagatacagctatcaagaagttccgattaccacagaatatatactataaaggcgagcaatgtttagccccactatctgctaccgtccttatatatcattccttatacactcccagccgaatgacaatctacgggcttggcaattagatacaacagtagaaaagatggaccaaccatatggtggaactactaatagaaaagaacactgctaactatactgtggtaatcatcttagctctaaggataactttaacgccgtaaggctgcagcgtgttcttaaccttagaagcaaaaatcccatatatcaccgtgaccgcaattgtggcagtcgtaatcagtatcgaggaaagcttaatttatcagtatgtctcttcaatatttgtccaagtatcacataccgtataaaatatggcaagtgatctgctgccttttgaaaagaaaactttgcgataagccaaaactccggataatatggttaccacaaacccagtaatatacaaatagaccacactctgggaaaaccgtcagtagccggaaaccaagcttaggtcaatatctagaagtatgttactgagatttatagatatggaatcaagcacggcggatatattaaaagtaaaagagatgctagggtcggaataaactatctccgagccatccttagctttacagtagctctagaggccaactaaatagtattgaggcagatatgacttaaattcgtgtacctgggcttcgaccatactgctggcagctgacgttgccttatagattgcttcatttgcgctagtatagatgctagataccacacctttaacggtatttcttcccccgctctcgatatgcgcagtattaatattagataggtcccgaatttgtaaatcacgtagctttagaaattcttttaggtctacctaccgattgcttagcattgattagcatagaagtttttcgggcgtatcttacttttagaaaatgtagacccttcggcgaggaagataacgaacatccgataaagataagagatagatagactagaacggcgacggtaaataacaatgctgtagttaaaactagcgaatccaatctgctcttggtggaaagctttatagctttagaaaggagaagataaaggagtgtctcttaaccgaataatagactttgagatcgagagaacaattgagaactatactatatcgcaaattagggaagcatttatataaaatttctagatatagtcaacttaaccagtgtaggcagtattctataaatttaattgagaccggcgcaattttctgcctcattctataggcagtagtagataaatgtactgtataaactaccagagtatcgggatctataatatatagtattataagggcaggcaggtaattaacagtattaatcgccggaatataagggtatgcaattataagtgatcaggctggcaagttagatctttagcctacaattattcttagatagatttaataattaaggtggtataaatactactgtacagagtgaccctcgatatctaagttgtctttctcgttattctatacaccttctcgcctataaatcgcagctgacttatactagcccccgttatatcattttctaggcagtcagaagttgaatattaggaacagaaattatatgactatcgagaaagttattttaagctatctaccagagtgtatatctcttacctcatcttcgagagtaggttcagaagacagatggacggccggcagaatatctgtcgattgacacaattgataaagatataaggctgtcaacgcctaataagggacaactacgtgccggtaatagtccctagggcttattggtaagaccgcgtgtggccccgatctagcggtagaattattcctagcttggatatagagctggactataggttatgcgtatacgaccacgagaaccttataacagctgtaagggatttccttagccataacgatcagtagtagattgttgatatctatctaacggataataaggaaggtgcgttacttagttttagctctcagagatcgtcattaataagtttataatgtcgctagacgaccacagaaataaagcggagtctattcatcacaaattcatccaatcgctaaaggagcgatatctaaatgacaatcgcctacctgatagactgatctacaagtggattaaccggtacaaaggctaccttaatatacctagggatccgctcgctacaaataactggtaggctgtactggaggccctagcgggaagtaagaaaggaaagtattttaaagcaatttttcaaacataagaccttataccaaaagctaaattctttactcattattctgggtctctagggagggatacggattaggctactttataaactaacagctatacattgcaataaggtaaatttactctaaaccacaaagctagttctatctcagctaacttgattgtaaatctagccagtagtatgctactgggaattgatcttctccactttttcgagactggttggaggaagggaagagcttttattactaattgacggagttacggtcgagctgcttcaatctcacgtccctaaaatctcctataaagatttgcaatccttataagtcgagttggaggagggctggcttttcccgaacttctcggaagaggctcggcaggacatataggtgcgtttaaaagagatcgattatctaattccaaccttgaaaacattttttaaagatcagctctatcttaaggtagcttaaagtatcataaagagactgttcgtccagctgcgaagggaaaagattactattaaccagggtatatatgggaagtataatactccggttcccatttcgatgacactgagataggaatggctgggatccgacctactcgaattttagcacttcagcttctagtatagatttgaaataaccgatcactaacgccttaaatagccgatagacgctaatctcgaggatatgcttaatcgataaagctccggatcgtctttcccccctaaacaggaaatacggcgccatttctttacactggtaagagcgagaggtttctaagcacctgttacagacaacacgtcagttataataggggagctaccttcccctagagtatacgaatacctagaagacttagccgaagaaatagaagttgcgaaaagatatggaaagccatactcgaatactgttgaggccgatcgattcgctttatccgcagagacgctgcggcaaagtcaagccttagttcgagtaatagcggggtttctccgacagtctatttttaaggcgttctttggctatctatagaatagtaatagttaaatagccggtagtgatcctcctaacgataacattgaagttcactatcgcagcgaaaggccgactaccgcaaatattggtcgggctataatagccacagacggtatagatatagatcctaggagccttaggccaaaccctctcgtcacctcagcagcgcggacgcataatgccgcagctactactttaccagctaatatactgccgccgttcggtatcatgactatcacagttggaggaactacacgagtattagaccaaccaatctacaacttatttataaaagacttttcgactggtctatttaacaataacttcaacgtctagaccgataagagagaaaaacgatccatttccctatatacgtactactctcattatctatacaatccgtcgtcggtgctatacgccgaatttagataaaataagcatactacctacgctattatactctcgcaaatcggtgcggggagcaagagaaggatacttaataaagacgagcagatggctagagtagaaatatagttacaggagcaaattgcgttactttcggatcggtgtaacggtaacaaagacctttaataggtaccaaactcgggttttactaaggccttaaagaggctcacggtatagaggaggcctggtatagtagggatagtataagtgaggcatataaaaattcatatgtggttaatctatcatatctcggagatattcatctaaatggtaacgttttaccttaaagcgagtaagcctatagtatctatcttatatagcgctttagggatagatagtaatgtactttttgatttagtgagataagttatagttcgatcaaatataattagacatatacttggtgtctagcactgatcgttatttatattttatagcctaaacagcctgacacattagatagtaagttctatagcccgaggaatctcaatagcttcaactattctctgatttatatactcttcttctatttaacacatagcgttatacttgtagttcactctctggccaccatcaaggattctataccatatggcgtcgcttcaagtttaataagtgaggtgctgcctcttttatctcaatagactatggtacactccgccgactcaaatacctttactaacccagaggcgcaataacaaggaccacccttacaatagtccgcctccctaaatatataattagacaatacaacttaaattctatatcaaagagtagcttacttgataaggcaggtatttaggtcgagtttcccagaaccctttagcgagggtattgtagtagggctatatatctcgctaggtacacttagggataccgagatactcgcaaagcttaatatatgcgggagctcgcagctagagcttatagtataggtagcagacctagtactctcggtactggtgcttatctattattaagtgctttcgcgtcttatagtctctttattcagtagtggcaattgatataaataattgccctactattacaagggaaccttattaccagctaacctttctatatattaccttaccgaagctatcaggggaagttgatcgtctagggagactgcaataccacgataatcgatagaaggactattaatacctataaaggttagcagttaggtataatacgagggtagtataatacctatattaactaagtacactttctatcttagcctcgcagttaggcgataaggaaactaattacatatatctagaagttgaaagcgtggcattcaagcttcctcctatagcttggtgctatatactgactgtattatatatgaatggaatgaggggcctaagatcaagggcttaaacctgactaaggatagcgataactgtaagcagagacctgaatataattaaataactttagtatctaaagacccggctttggcgggtagtgctgcgaagcgcttttatattattaaggctcgatgagtatatttctaaggtaccaatttacctaagaggcgtggtaatcctatgaaagtaaaagaaatagagaagaacgacgggtggtacattattatgttggcatcactggcattaaagaaatgccgataatattaaaaattaatgctagcgggagaattaactcttaattttaggacagtatatttgtgcccgtatggctcaatttaagattctctgtatatgaagctataactttagaaatatactatttctaagacctaagagatatatattaccctcgatcttcccctctttaatggactttgtctatttccaatcaatatgatgagggccggtatagattctgctagtattttgttactacttctcgccgttttagtcgtaagtggctgtatattcgctctgcattatgtaggtttcatatactgactttcgataggttgtaaggccctataataacccaatctatacagtaatatccacctatctagtacaatccctagaaagcgtatctgcgaccgtgacctactaatatattttctagtattattcttcgctaatattcccactgccaaaactattgtacgaaatgatcatagaggtcggtccctattattaattgtttacaagtatctaataatcgcaatagtaaactccggcttatatatattcgcacagaattgcttatatagacgctacgacagagaatattgaccacttaagtaaagttagcgaaacctcgtgtaacgttaatgctggaaattattatcgtctgttatatactaacctatctggtatattcctttacaactatgtaagtactctaaactttaaggcaaatagggctccgtactgacggtactaagagcctcgagtatatcttaataaactgtggaagccttatacccctagcgacaaaggtttaataaatatgctaggtagacaacttttatacgtttagaataatcggcggctcttctcaaaacgcgagtgactcaattgacttttacttggtagttataggcgaaactatggggtatcctatagagtagtttagaccttacgaccttaccactaagtcggattggtattcgggatggaccaattaaggtactactggagcgtagcacggatgtgattcacatttctgtatattgattcttttagaactcttaaaattagggagctgtttttcctatatgtgcgctcgaaataagttttaccaatttgttctctttgattgcttctccacctctatttttattaacgctaggcctaatatagctagtgaatatttattacccttttcctattcgatagtaattgataggctaggctagatataggctgaggtgatctgactaagacttaggaaagaaccaaagagaataaaatagtgaaggaatttcgagcggacctgtaaagcttgtacgttagtaattccctttctttaaagtatcgaacgctatcgctacctaagaagcttcttagaatgcttggaatagcattcgccgtattgtattgtaaaatcgttaaaaaccagtattagccttaacttagttattgtgcttatgcttactgtatgaccgatgagataatacttcgacagtacttccgcctaaaatagtcaaaagcataaaacaaataatatcacgcatatagggaaggaaatcggttaattactagagcggttaaccctggaatattcaccctatttccattaactggccccttactacatttctcgagataatgctaaaccaataaagatcgaattaaatatatccgccttagggatagcttatttttagtcatctcctgcttacacacaactgcctttaataaaccgtttcgagatgtcagttcttcgagctctgcttataagaatgacaagtgtgtacgaagacgcgaaatccgttttaaatttcggtaaatagcccgactcagtcgtttcaatttgggccagccttatctctttagagttttaattttggtcaggatttgacctatacctaatagatttactaatggtacccgagattgcttggtagggaatatagtcttataattatccctctttcgctaaagtgcctgtttagactgcaattgagctaacagatacaataatatggctataggatctaggctgggacggtaaatatttggtattattgctatcaatgttcctaccggccgctccacttcattctcaacggcagtgatacgatgagttagagaggtattcgaaaagagtaaaactaataggatcatataactaatatagtatttatcggagatttggtctcgcctatctggtaacacttttgtttctatagctttaccgggattttagctaatcaattgatacctagaagtcataacctagccggtacggatgctatatgtacccacttgcgctgtagatatgttgaagctaaagtctaatatgacgtacggtagctgtcctagacttactgcgtaggactagtaatattaaatagagatcaagtattctataataactagaacggcgctacgagttttatagtataccataatatgaccgcggttaccgttatcgatctttgaggctaggccatttgtatcgctctcagtatcaacgggataaggattatactggtaggaagcagaattagaggtaggagacagtgaagccttattatgagaatggccatatctgtaccaggtcgactctgaattagaaggcgtagcgtatatatttaaagcacgactgtactgatgttgattcactgtaatcatttttactaccttactaccttaccaccttcactaccttcactacctttactgtcgctgagtcctgaatgggaaccactcttaggtatagattagcttctatcttatatacactgaacctagaattttaatattaaaatgtatcccagagtctagttagagaaataggtggtcttgaaatggagtatcggcctgatctagcaagattaatcccagataaatattgtgaggtattttattaataagttgtcaacttaagtattatttgaaaaatgcgagaattcagctgtcctaggtatgaccttcgctcttttttccggggaatctaccacttattgcgagggaagagtggttgaacctacggtatgcctatagagataacggaggataaagcagtgtataataaagatcccgatcaaagtaacactgcctctaaaaacgctgctaaatataagtaatgtgccctgctttgaaagccttgccgatagattactactatagattgctgtattgtgccttttatgatctgaggtttttgtggctgatgttggtctataaatagaggaattagtttaagagctagccagcgtgcctgttaacgtcctcgataaggtttggcttttatcgctatgggccagagataagtaatgcccagccgtcccagtgatacgattagtagtgccagaccattcggtgccagaagctctgttgctttagaaaaccctgctttatctggtttctctgatctcggaagcttcggtatgtatttggctagtcgaataatacagggactctatgaaaggtcccgatgagtccttagagtgcggtgtttctaaactagcctatacttgagatgtacgattgaatgcaaatggtaaaaaggtggctcttatagtcacgttctaaagtaagtcggtagtgttattctttaaattctcaattagaaagagactatagttattagaatcggtgctggtatatgatcctcttatggtaccggttatagaatctttttcggtaattgctccattatgcttgggttccgttataggcttatcaacaggggcgctgattggagaactggagtgtaataataaatcacagtataatggtcgatataaggctaataaagggaattatttcgagactagtgtgacgtaaggccttgattcctccttatatagtgcctggcttatctaaaaactaatagcttgagtgtacgttagttttagtgaagctaacgtcggctgtaagtcaataactgtcagtgatggtattcaaaggtaatatattgtctctgaaggctaggaaagtataagaaaaatctggaaagaggcctatatgatatatacgactgctgagcgatagctatgactttctatagcaagcttctttacagactgaatatatattgattaaatacggaaagaccagagtgtattaataagataaggaggactgttcaatatattaggtctctgggaatcgccgatataattctaagtttctagggctaggattgtggtaatataaaaggtatatagactattataatagttagttatgtctagtactagccttagaaaatgtcaattctgcacgttaatacccagccgcatatttttattcgctagactgtaatataagtcgtagtagtaaatatcgtttaaagttcctgcaaatggtaaccatcgttgaagtaatagattggacaattaggtcatcgcagatatctgatataaataattgtatctaccggctaaggtaaactaccagtctattgcagtaaattagtggacaatagcgcctcctctaagccgtgttaagtaagagcaactccgtaagcgttgtaacaatctactacgataccacaatgaattttggcttctatataggatgaaaagctagcttattatggaactgcctgatagttagatctttacataccactcctatccagagacccctccgcccttaagggaagatatagtaagacaaaattaatataagtattcgatgatttgccgctaattgtgaaagaaaacacggcttaagcccactattattcgaacgcctcgcgactatatttctgcgacctctactcagtcagttggcagagacatcccggtcttctgtgccccagttcgtcaggaccaaaaatgggaagctctggcgaatcatttgaacaataatcgccgtatggtcttgtagtaatataaaccgttttatacttagttagttcactttggtgcacagtgggatccgtggcgtatatcaagaaataccgatctcaatacggtggttaaagcaatggaacctgttcaacatagaagccgggtatgacatcggggagaatcaaaaccaatgtcaccattttatttctttgattgtttcttaaactctaagtctagtcacgccaggcctaatgtagttagtcgacgatgtactgctcatcgccctttcctattcgacggcccgaattggtctaggccagaagtagattggaggcgacgacccaaagaggacagtaggaaggctagtccggagcggataagtaaatttcagttggttgtaatacttgtcttatttcctacggccatattgggagcggatcataattctagtaaacttgggaagtttcagtattgagaggctctattcggtatatgcaaagggctaacctatctataggctgtgattggtcggtggttatggcccccgattgattattaacctcaacttatgccctcctttttgagtctcccaaccaggtgatcgaacgaggaaaaaaagttcatcttctacgacacattggaaccatcaccccgtatacgttctctctccgacgctacctacgcctaacgagcatccagcgatgtgggtggagtcgaccgtgtttcgcacttagatcaagagaaactgcagcatgacataagtgctgtaaacggaacgcttcaaaaggggctataatacttactgattgggtcactagaaaggcgatggcttcgcctcacgctgtgagtgggtagcgagccaggtgtctgccttgcagagaattgtcagcgcaagtcttcgtgatatcgtaatatatgggcagtgtgtactaccgactctggtgggaacatgattgcctttaatggcctggaagcatttctggtatatgactggccgtcgagcgctgtagggaaaatatgaaagtgtgtaaagtagcgatttaacgtgggttgggagggatggaaagctggagacggagcagtttctattcctctcttattacacagaatgaggacaaaccaggagaatttataaccatatgctaagttatcgaatgggttgaatatatcaacagcgtgcaacgggacccgtcaccaacacaacaaaagtttaccagcagtataggccttatctctccttaaggaaaacgcaaatagatagcggaaaatcccaatgccattttccctgcctcgtaaacgctctaccacatggagtctctatcaaggctcagcctcatcgacagagtaggcttaaagatcgctcgcttccaaggctgaaacaacaccattataaagagcctgaaccgctcgcttacactcccacaatactgaagcttattcattacagagctatagaaggatatcgctatcgcttgctagcaagtcatttgacgtttaaagctgtctctactcctcctcgagtcatattttctaggccgatttaacgacgtagcattgccatagacaaaagtacaagtcaagcaatctaagaactggtatagcgagggagtcattgaggtttactactttcatagactccgccataagggtaccgcgtgttctcactaggatctattcagtattagtaggggttttcattccctaccgtaggggatatgaccgaccttaggttcgatagttgtgccgtttgtaacttactgtggttggttttctaacttgggtttatcttctagagcgtaagatactcggcactgtctcttagccggacaattaataggggaaggcgaagtaggatggtccattttagtcattaagataaattggatcagaaattatgcttaaggggcatttatagctgacaattcacgtaaggctactgttatttctaccagtacttccttacctagggtcgaccgcaattttaaagccaacgaatagttagcttaaccgctaacgctcaatcttactacctactaagagtaaactgcttaggaataagtaggattaaatcgtatctacagcattaatataaaccaatgcaaagactgtcttataatggtagtctgcaagtgtacttccgatatatggatgctataaattactttcaaattatcgaagctttactgtgactacaaaccattcgaagtacggaagtgcagataatttgattcccaatattaatgtcaacaggcgctaggaatagccatctcgtatcatatcactagagctacctaaagtagatatcgctagcccttataaacgatcaaatattctccttagggactgtttcaacaattttttagtagtattatcgttataagttatgctttgaatggccttctagatacaatagtccttcgctagatccagggatctccttaaactgaagtatattagtctaggattagccacaagtgcattaacaattgagagatattcccccctgaccgccaacattaatagatcctcgaaccattaattcctcaggttaatatcaattcggctatggcgtagtagttcccagaccatctctaggtcaccgccataggcagtaatgtagagagcagtatcataggttgcgaccgtgctttcattaacatttagacgtacgccctgctgtactaagagccttactatatcgagataaccatataaaaccgctcgataaatgggtagatctattaaaccccttctattaatctccacgccctctatactcagtaaataagcaattgtcttcacatatccgtgatatatagtaacggaaattggagagtggcctacaacgcagagattcagagtaatcctaggcactgtaagcagctatcgtaaaagtttagtatacaatctcgttacggtatagtgtaaagatatagacggggccttaagtctcccacagcttctaacgaaattaacgtcgatatctttctccgccaagagcctttccgttatcttatcgtataacgagtaagtagacagctaaagtggcgtattgccatctttgtctttacagtttacgttagtaagggggtagcccaggatcaaatcgaccacttctaggcgtctgctttaaacggcaagatagagcggcgtatagcctttccagtcctgaatgtctaagttcagacccttttgcctaagacgccacttaacagtatctatcgacctatataacactaccttatgaagaggtagctcggaatcctgagcatttcgggtacctaaataaacttcacagtcgggcccattaataaacattgttcttatggcgggtctattgattcaatatacctaagaccacgccgactggcccgaatcatcttctaagttagggtcgctgccacttaaaagtagcagttacacgaatcctattcttcctgcaaagactgctaggtaaagcgccgttcgcccatatttatatttaatatccacactggcggcgtggtattctagtacactcttaacgacagaggaactccggtagtggatagcatataacagggcgctatcgcgcacttgattttagatattaatatctaggtctcgacgattgagcagcagttcgcgcatagcagcggaagagtatttcaacgcctatatcaaaggagttttgccttagtaaaatgtattaatgttagcgttatactggagcaaagcatccataaggccaacgttattgtatttaacggccaagtgtaacagattactattctgaaatctaatattgtatttccaggtactaggctgtagtctaaaatcaaggtctttacatgatttggcgagggcgaataatgtactaccatctaaatgcgacacgatccacagcaaaagctcgttaggtaggtctctgatgtttggctgtaatttattagcttatccgtaactttagtaagaaagaattggaactgaccatagtagaacagcagattagaactaggaatcaaataatttgtatataagggtgagctgtagggtataaaagttagacgtggagagatccttatatacttacctcagctaattccgcggttacctagggtatagcccgttaccgctgagaggtacctagcaatcacacagcagcattaaattcttgataacaatgtttaggcgggtgaaagaatccttggactctagctcctgggaacactaaagctattcctagtagttatcgatggccctgggaaccggatatagtctctatatacctacacctcgaatctagtgctataggcgtcgaagcaaataataatctaacacacacttcgaaacttctataggtaacctagaatttaacctagcatttgtcgactttactgcgtcccgccgcagctaacctattcgctaatatatggtcaccgcaacctacagctacaagtgcagctaatttaggcagtagtgatatagaatgatattccttctcgcaggccactgatcggcctataccggcgtatactgcatccaaatgtattcttcgacgtactaactgtttcaaggaaggcgttatatgccagcagccatacagctatataggtaaggaggctacggcgatggcatataaagctgacgagggaacactgcggagattacctaacatcaactcctatctaaagtattttctaccttttaagacaatctcaatgactactataccttagaacccatttactgtctacggaatcccttacggtggtcctatgtcctgttgcagggtaacgaagaaaggccagctgtgcaaaagctctgtcaaattttaagacaccaagatcggccataaaaggttgaccactcttactagagagccgtttgacttatcaactttacagtcaaagctctgtaatattactagagtcttcctctgcgcgagatagtaccgtcaacggcagaccgaccaagttggctagcggtggtataaagcagctatccgcaaccaggcgcgagtgccgcatagctctagagttaccgctccatccattacgtatccgggccagcgttagatatcgtcagtctctaggagtcgccctgtatcaggcaataccgacaggtcaccttacgggctcagataagacctaccggtacggctgtcaaccaaccctaagccagtacaactattcaatccatttgtgacttccacaatactgcggacgaacagtgttctatggcatatttcgccggctcaaccagcgatcctaacatcggtcgctaacatctaggctggcgtccaagacttaacgctcaaggatctcaccctgagcgactatattgacgacatccactgtgtattttgtcttaccgaggatgaagatcttgcaaataagagggtgatcttgcgctgtcagtgcaaggcgctttcctacctagcctgcgcggaagagtggctagaaaaacgaagtacgggttttaaaacgttatgctgtatatggtaagtagggctggttccgttatgcaatacccaaaatgctgattaatacagtcgaaatgaagggcctttagacgccttggttcgcccaatacgagtccaatcgtcgcatgctgagacacatcatatccacacagcaactaaatcatctgctaagagagaacttaccactatcaggaatccatcaccaaataacctgagtcagagccagccgcgtcagcggtcagtgggaccctaagtgggatcagttgagcagagcgtggagaatggcccccgtcgctcggctaggctagtaggggcccatctaccaccaggcccttctacgtctgcaccgccccgccggtcagcacgactaaattccactcgaaggtgatcttagtttacagcgaaggtgtgacgggaatgagaaattagcgaagcgactgtcaatcacgcgcgaagacacgtgaccagacgcaccgcattcggcccagtaacatagagcatagccgtggtatggagttttagagcaagtttagaaatgatgcaaatgaagttctgaatgttcgaactcgcagagcaccaaaactaaaaccatgctaccttttcatctttgcaagtactagatgctaatacacccccaagaactgtgggcagtttcgcttaattttgggatattttttagatcgagaccatattcatacccaacggtggtggccaaagaactgtagacatggatttatctcagtggtgcgtgtcgcgttaagacggagattgttgacagaagaaaacacatctcgggccggcgaacgattctggcaaactcctatgctggttatattgactctgggatttaatatgttgaatctaggaaactcaaaagcattcctaggagctgcctaccccctgggaaatacaatttagctcctggggcttttacaatctccaggaaaatgaagatctacccctgggatcttgactctacgttcctgactgagtacagactggccccgggaacacattggttagatctgggacctgttgcactcgtaggaccctacttctggaccctagagtcaatattttgctttctgaggtcgtgaaacgctctcacaagacaccctcaccagacctccgcacaaaactgagacattcgaccactcccagaaggattagccatagccctaggaaccgcacctaaggttccaggagtaggtaaagctgctaacaggagcatgactttaattcctcgaagtgggagtaaaaggccctagaagctatgttgggcttcctagggtctatttgacccctaggagctgcttatatgctcctagaaactgcactaaagattctaggagcgagagaactcctagggctaagacgtgcgtttccggggccggcagggctgtcaacaggaacttaactggctttataagagtaggaatagagagtgtacaagttacgtacgatttcctggggccatatgattcctaggcggctcacatgttccagggtcaatttctgaagagtttacggcaatcaaggtagatagatatttatacagagcacatcgtcagccatcacctttcgtttacatcaagctatttagaatactgctctaatgttggctaatatcggcggctagtcaggtcaagcgacgaacatgctttaattctaattaggaaatttaacatctaaatgatttccgcaactcagcagtatatctattcctttccaagaccctatccgtcgcacctctaatatctatagactccaccgtcattcttcgaaaatcatcatataattctgcaattgttcttatttgtaaatactcgctgcctccgtcacagccctaccatagtaggctgttagacccgcctctttgactattttatagctcggttcgtgttctctgctagtgacctcgtaagccgcatacggcaaaacgcacaagggatataataatcactagagatccgaaagcggcctggccaacggatccataatacataatcttgtaatatagaatgtggctcctgttaaaaaactcgaaagatatttgaaaaccgtggacgcggctggcaatccagccccctaatgagagaacgattatactcacgacgatttgaatgcacccgtagtaaaaccgagcggcgcagttctcttatagccactttaggtagatcacaaggacaaacccggagatggaaaacagggctaagactagggccgcaatcaccataccatcgacgacgttgtctataagggtgtagaatgtgatgtccaaaatagagtcgctcggtatcacgaggtcggatttagcacagtctcgcaggaggactgcaaagtgtacagtggccgagttgagacgggtaagggctaaccaggtcacggtaagggaagcaatgataagacacgtccgaatcatggtcgcagaagtagtcagagacattgtgtccgcagatttccgaatgtaggaaggtaaggcaggtctcatttaaggaaacagtgacaagaagtaaagaacagcagcggaatgataaagcaggtcaacctcggagcagagtaaatttatatatactatacgctctttacacaaatgctgccttaataagagatagcgcagttgatagtaaggcgtactaggtgcctttttcatgctttgttgcctcagtggcaatcattataggcacagtaagaatgtttcaagtagaagcactatttctatcttaagatcgacggccacggaaagtattcctgatacttggtagtaaagcagctctatgaatcacttcgtgtattcctaggatctactatccggtgaaacggggctactatatcatcattatctccaggacgacggattaggtatagcatatcttaagataagtggtgattctagaaaaatattcgatacagatagagattgccttggtatttttgcgatatatcactttgctatactcgaggaacattttctttactattaattgggaaagtccccacttccataggaagacaaatctctattttctgccatttttattgagcttactgtatttctttgccagctagcttagggtctgcttccaaccatatagcaacccttattgttcgttaaactaaggcagccgattaagaatcgattctgaactgtgaaatctaaccaaataccgctaataagtaggtaactaacatagatcaagtaggaattctctgtatacacatgctgttggtattaagtaatcatattcaacgttaatataaacgttgatctgaccccagtcaccacccgtataccgacaaaggtggttatccgagaatactcggtaaatatatcagtacgatactaccaagctatcgtagacgaggccaaaggccctagcgctcctagaagcacaaataagactccgccagtcgcctattttactgattttactatggctttttgtgcagctgaatcataacgcaataacaagtccctagatataggaaatgtatctcccttccgtatttttctatttataaccaacttctggaggcagtgataggtcggcgcccgtttacctgggcactaattagagggcgagcggggtaaaccaccgaggcaaaaccctataggtcctataggtagagaactacggagtatagcgaagtacaaaatactaactctagatacattcaagctagtagaaaatattcctacttatctatattagtaagttagtgatttaatatagcacctgcgaccccgagagctttaaggcagagaccacgaagcaggccctagagcgcctcgtaggcgcagctggacttaacgcaatttgagcattccgagctccctatatatatagaagtctggtagctttcaggctttcagcgccacgttttcatttattactctgaggtggattacgtatataggttagctaagtggcagatccaggaaataaaacacttacctaacaatagatatagatgcagccccggcctttagcgcattttgtgtcacttgtaagagtatcgtttactctacatcttgattactatttaaacctttatagatcctaggagatagtcacaaattataaataatagagacaaatttaaaggtatggcttttaataggtctcaattagtttaggcaccccgggccctttattttctactactaactagatcttttaagtgactagatatacctagagggctataaattcctcccctacccctttttattatataataatttgtagaccacttaatagtcgagtaggccttgcgctcaaggcagcctaagaatttcttttttgtaagtttactttttaaaacgactgcgagcttcttattagttcttaaccaagatcgtttgggttctcctttatattatctcaagctctgtctatcgaagcccgattgccgcgatggcgataaagcctacccctggctatttagatatcggcctcgagtttgatcgcttaaaggacgttaaggtaatatctctcaatacaaaacttgtggcttttatcgaaaaagctcattcatcgcttcagtcataaggaatttttaagcaataggattactataagagatctctcctttattatactactatagggaactgtataaacctccttctatatcttctgcaaagtaagctagatgttgattcttatgactagtaggggcagacagcactctcctaggctaccgagtacggcttattagctattatagaaaccttactaaagtaaggagcaaatatcaatttatccgattataagggcggcacaccgttagtatagctgatatataccggtaaccctaaaatggtagatatagcggtaactaaggcttacctaagagagaggggtataaaagaagtcaaattaagaggtatcaagtcggcctaggtttaggttttaagttattctcatttactccgatatattcgcccttgtatctgaggcgcccgatgatatggcgaaagcccattctatactataccaatacatatattagataaatgttataactaaggtagctggaaagcactgcggcgagaggttagactatccgatttcacactattgttatctttcttttatgttaatttagacttattaaagtggagacaaaaacaagcaagtttatttgagtataatagatatacagatatatattttattagtaaaaactctagtcttacctagcgatatagagctatagggtaagggtatacgtactcgtttccactttagcccgtagcggggctggtacattcgaccccggactgtctactagaaggctttgagttcatagctctttatactagctatatattgaccgttttaagtaatataaggtcttagaacctttgtttaggatagcaaaggccctgagcgatatttaggagtaggataagacgatatattgattatctattctattaaggctataaaagcaagctagcttattatgttttaaatatgatatcataatgtcctggtgctagctctgtgtactagggactataccacagctctctgacgtagggtaatatatagctttagggctaatctaattcttcgagctgaactataatagtagagattctatagattctctattatacttagcattagtcaagtaaataccatacttttctaatgtatttttaacgagttactgtatagggatagtaaacacaactatgccttaattgatattttaaccacggtagaggtctactgtttccgaaaaacagatatagctttcttactcacaaacacgtatgtctatagtatcgctagtatctttaacaaataggttagagtgatatcactttaatcgatatacaatgatctttaaagtaaagtaacgcttaatgtaaataaactaaccctaaagagccttatgccttatccttaacaagctcgatggggttaattagttagcctaaggtaggtactattcttttatatatcagataaatcccggtgacgttctattgcatttcatataggaaagggttcttcttgagttagggggtagtgtgcctttatgggcactgcagtacaatcttgccaattcattcaaaaagtaccgcctactcctatcttatcatttaatcggtgcttagtattcttcatcttcttcatgctataatagaatagaatagaagtcgctctccgtttgcttactttgtcttattgtaatgtattcccgttcaatggatctaagaggactataataaatatatgtactagatcaattccttattaataaataggcaaacctttagagagaatacagagcagtctacatatgattataaacaagagatactccatttacttaatacagaagtcgagaagctaaagttctactataataaacctaagggaaaaacttagataatcttccgtttgatcgaagcctatgttatacctctcctcgttatactattacttctcaggtaattcattgtagctactcgattcgggcccctacccgcttataccagctataacaagggtattgtatatatattgtctatagaattgatctccactctattatccagcaaaagctttactgtacgtaatatactatattgtacagcctaagagagcggcgtcttcctattctaatctaggtcatcctttactgtcctatcttataggagataaagaaggagcttagcacagtcacctattgcagtatagtgaatgagagaccttttaaaaggtcctcgttggttgtatatcccttggtatttaagcgttgcctatatattgtgaagaaacgctataacgtctttatcaaagtatatctctctaatgccttttaggtattaaaattcactattaatgatagtcatagagcgaggaggaattaccatagtgattgtaggtaccccgggatggttacaaaaaagctatataaagagataccagaggcttgtttggttattaaggaagcggaaagataggaatttctatatatatcgcgatcgtccgctttatatagcaagtgttcaaactgtacactacttatatacaatagaacgggcctatatagaatagtcgattgaataggtgatggatattatcagtttatatggttatttatttgcgtccgctaagtagggttttttatattcaacgatagatcaagttactaagggttgttggcaacccgaattcaaatttagggtagttaaaaaaggaggaggataaatagaaaaccaataaaagtggcctactaagcccgatgaataacatagctggtccgatttcgaagtttcggccatagtctagagtctatatatcagtgtccgccttaacgcaggtaaaagccccggacaattcttgctgcactggacatcagtggtgcctaatagtcgggtcttctattattatatacttttagaccgtatataagtagtagatctttgtccggggtatgtcaaattatgaccagtggcgcgctgaggagttaaggcacaattcgttgaatttttctagtatagcttaggcctacagaatataatgtatatttctgatagccagttagtttcgaaggctaaaaaataataagaaggtataatggagtccaataagattcaattggaacaaattgcgatcaatatactcatatgccttctataacgatacgagacggctacctgcgaactgatatcgcctataccagatataaaccaacatccaatacagagcgtttatagtctcagtgtggaaaaccaggagaacttccaacgctaatatcaaagcgagttttcgcgaagccatgatacctattatcccgcaaatatactcgcactccccatcgagttgctgtatgatgccctagattatctatccacggaggatttggtctcgttcgcattttgtcgataggacctgtttcaagctctgattagcttccttgaacgcaaagcaaggccatctctacaagatcttggcctcttagtcacactgttcgaggaacagtggctaaagaaatagcttcaaattatcgtcccgatctgcgctagatccgaacagccgatattgagagatcttgagacacttgtgaagttattcgaagatagtcattggctgaaagagcagctccgagatatcattatagtatcagctagacgtgaccaaccaaccgtgcacagttatgtcgagcttggatttgaagagctgacttgccggcatttgcgaaaaaggccgcatacactatttgatacgaacattctccacatgacagctttacacggaacggaaatgatgtatttataaagataatttttcttcgcgtagatagcaatatcactaggcacggcctcgtccacacaggaatcacttttgaatttagaaagaacataattgaacgcattagaaggaggccgagggagagctctccatcccagtagagcacaccactgcagctcacaagctattaatgtggctgtcaatcaaaaggctgatacaccctgaaagatatgatgaggactatgtcatgcggttggaagaagagcgcggtctcatcagtatatacggccaaggcgagatctcatacactgccgataacagtcaattaccaatggatagcgcggtcttatcagcatatacggccaaggcgagatctcatacactgccgataacagtcaattaacaatggattgcgactctaaaggtactcgacccggtgtgaacggtgtaggacagcacgtcaatattgatatcgacaaatttggaaacttggatctggatgctacgactgctaggcgctactacaatagctactttaagcacatgttcaagctccacccattccttatagaaagtgaacttaggattaaggtcgatagctttatctaaagctattgttaagttaataattcaccactaagctctgtttccagctacgctcgaccggctcgtgatggtccgcctctagccaaaaagaggcagttaaatgaaaacctgagtatacgcggcgagttattggagcctatctctaacccactacggccatgagtcggtaaaaacattgatactgccttaatcctgctgtgcctggcccttggggccatttgcgaagctcctgcccctctccctaggcccgttatggataagaagattgactaccttaactagtatatccctgctccgctggcactattcaattctccgctgcctgcaattacgatatatattacggatgctaatggtgtgcttccccctgtaaactctggcttagcggccgtatagacgttgctttcgaatcctctctatagtgtaccagcctagcctattggctaagctttcctaaacagtttatctaacaatcatatagaaggcttgttaaggagagatgttataaatacacgggataaataagggaatataaggaactaccaggctatccctagattgactctctatagatatacaaccgcaatactgggctatctgtagggtggaaatgagctagaatatattcagtgcggcttgcttgctggactttatataggctagttagcccaccctttctagagccacagttagatttcttaggtattgagggcttactagattcttgtgagaactaagcggtatgggtaacttaataagggagctacgaaggacttgtacgattttacgtactagacctgtctgtaattggagagtgaccttctcatagagctcgatattctagcgagtggtatctcctatttagaaggttggatacctattccgaaaggaaaatggacgatatttctaccaaataatcttactataccagagacgataataatactgttttattctacctaaatctatctatacaaaatcttgaatcgagtacatatagacttatataaggttgaaaagtaagactagatataatggtcgtttaccgtttaagaagctcttagcctgaacctcgaccgctggcgtgaaagtctacccgacagcatataataggacgaaagtgatccgccggtaaacgaaatcaacgctgcccgtatatatactaagtattacagtgcccggtatattatccaccgaccccttctctattatatactacactacggctatataggtactcgcgccggtccgatcagctagaattcaatggaattacctgtattctaataattgcccccctctatactatatagctccgcttacactccgagtatatcgagtgatataggctctacgctggccacaatctctactaactggcagctacctgaggtccgattatataagctgccgaagaagctgaaatctgtataccatatctgtattagttcggctattaagagcacagaggcatttgacagagtaggaggatatcggttagtcgttaccaatatctttaggactgcctatacataagggatcctctggccctagtctcaaaaatcacgaatatagaggaaagacttacatgttttctttataggcaattcagtaatatactcgtcctatctgtaagttttatattaggtctaaaggagcttatcgagctagagcaacttaagcgcctcctcgtccgtaccataggctttcttatttaaagcgaaaacatatctctaacctttcgcgccgatactcgcattctcactgagatatacgagaagatctttaataaacctcctaacttgaagcaggccactagaatgagagtcccttgattgtatatctaacgttaatagtattctctttgtctagagtaccttctgctaataagcctatctaaaatggctaccttttatggctgccttttatagatataactaactcgaaagtaaagtagggagccctaggctagtcgatttaagggctcatatacctaggtaatattttcttccgcaactgtatactaagagaccgaaaaatatatacttattgaaattcgtcgtatattcgactgcctaagaactctacagcactctgtggtactatggtcgtgctaaaccccagctagctcttaggactaaaaacggaagattaatttaaattggtattactataaatagtggtaacggatatcaagatcctcctgtggtaagaaaagactgaactgaaataaaaacaaggaaatattcaagtaatagcgatcgtatctttagtcattatttaggataaagagattagattatatttctatgagagatagaaaaacggtggaagaggaggaatagataggttgattaattatctcaaatagcggcctgctatatgtataaagccgatttagattggctggggaacggagggcatggccctcacttgtccgatagggtctgttataccagagaccatactgcgcgggactagaggccttagtcgctaattaaatatagggctgtaactaataacagctaaccgatctatctatcctctaatcatgtaaagaatcttattacccgcgaagagcactaaccgacttaggggcacctagctaggagcccttaatctagttagtctccgatagccataggacttactagactagcagcactcaagtaagtactactgatagatttgattattctagaaactgttgtatgcgagagtataacattaccggtaataacataagtattgggataagatttcggtatataagtacttatatagtttcctagcaatatgcacgctgtgttatttgctataaacagtctagatttttctatataaatcgcgatcctaaattaaaaccagaagtgctaaatcgcgataataactattaaaatggactatagtatctattattatcttaagtggagaccctcgataatatacaaaatcgaatatacagctgaagccattgataagtcatattcgaaagaagactctggtatagattaggaagtaagccgctttattagaattagctccgaaatgtctatatagacaactaagttgatttataattaactgggctccgtgttatatatataacctcatcttttcctctagaataaaatacaattaatatacctctgaactataatatattgtaagacaccactactagtctagaaagcggtctaaaatacggtggcttcattgactatctaatcaagagttataagaccgtcggatttattctcctggaattaagtcgcaagagtataaaggtataattggatacgaaaactactaatatcggtacaaaaagaagagaactctgtagaagaattcatacttaaaggtacgtttaacctcccgctcattagacttaatacctagaaaataaatcctagatacgctattacggcttctagagatacctagcaacctagctaaagaaaccattcttacgaattttgttggcctaagactggtcagaaaggtatggctcattagatttatcctctgttatgttctcgtcgcccgatgagttagtagtattctccttttgccgacgatctaattggcttcgttgcttcgcggatacgataaagcgctccttaaagaccgaccgcattgcaattctcgtgccctgtttgaaggtgcctagatacgagataatgaatagtatagtgttataaaccttagtaggatctttttttttatcgctaaattcaccatatattattagaaatagaagtcgaaatactgcgtcctgtactcgagatttatcgccccttacagcttgataacgcttatacctgagtttataatcggttttataggcccttaaatcggcaaaaatattatcaattaactgcctagcaagtatatcaaccccgaggaaatcatatatttcacagagagtgtaatattaagggatatcgccttataaagagcgaaaacattaccgatagcctgattctaagcccctgagagtaatattaaataaagtaatattactgtaaataaattcagtttttcgcagctaggaaagacgttaaaagctgacaaaggctgataaatatggtatcgtcgagatattaatattatagaaagtatccctaatttcgagtattattttgtgagaatttgatttaaccgctttagtcgaacccattttgtcgccgagtttcaaataaagatcattgggtaatatcctactcccttctctctttaaaactataaggctatcacttcgactattatattttacgatagcattcctactattctctcttaccactctaatgattcccttaaccaatacaactaatctctaaaggttattagtatagtttcgttcctattcagtaatcttataagtgatgtctttgacctccggtagtctaaatataccactattgtggtaggcacggataaggttaggtgtttgtgatacctatagctatagaagaacttcttagatgttaaacggcttatgggacacttgtgttttgatcttaagggttgaattaattaggatagattttccttttttctaaaccactaatttagacttggtaataagacgagagtaagtttcgggttgtgaaagagacagattttccatcatattcagaaaattcttattttccgaacctataccttaaggttaaagatttgcagcttctttaatataagcgtcagtcttgtagtgtactataaattttaaatcgcctaagttataggagataatccgatgatatctagtgctaccggatacttgggtatttataaacgctttctcaaacttgtgaccgtagtctctgaagtagtgtggcccgataaatgtatatatttcggtttctgcctagtaaaatattgctatattacttatagtcttaattttaatggtaaaaggctccagtccatttctagagagatttggattaatgaacgacagaagtttgcggatattatttcgattagttatcaagtcaacttaatatatgttatataaaggcttttcagtgtatagtaagcgaaaaagtggtttaagcggacttttaggatagcaaaacgcgttttgagtaatataaatgagcctaaagtctttagccacttttttagaggtttggggtagagaccatagaggcgggcagctagggatagcaatagtagggctggacgattcgatctaattataagaagataaatgctctatattcgtgatagatagctggatcttcttaatatctattaactctaggcgaggtatatctacgatctaaatagaacctattgttactttacttggttagtgatattatgatagctaaggtaaatgagatttagattaagtcccttgagatatttaatcagtataagtcctatatattaccctgtatgggtttagataatatatacttatataatctagccttaccttatatatactctttgtctagtttgtatagaacctttagatatccctgtaggactcttatttaccgaataggagattagaaaaggaagagataggtaaaaggaccctataggtaatactaataatgatactaaatgtaaagtgtgaagtgataatttagctacctataggattatctatatagaccgtactctagactatcatttgatactattaaagccataggttaggtagaatcctagtaattgtgcgcttactacaactagtagccttacctgtctaataggtactaagtttaccactctataatacctcagtgctaatagaaaccatatatgtcctagatataatctattagatgtaatagtattacgttagttcgcttctcttagaggcggtaacacagtgtaaaattataggaagatattgataggataacaactgctaggagtctaggattatcggggttgttaaagtctatctctagcctacttagggttaaggggcgcagatacttctgcgaatacctagaacccctttagaggtaacaaccagctcatactatataagacgagaaagggaaacgaagtcatgtaataaattgtcaagttactgcatgtaaggcggccctcccgcgtgatttatatactgtaggtttaacttaagttccgccgctactacaaataaagtactatagaccacttaaaaaaggtgcttattcttattaagcctctctatctagaggctctaactcttaactatcgaaattaccatcgggaaaattctaataggtaaaaaacctgattgtctagcaagtactatgaaatgttaaacaagtacctaggagatctattttattagaagagaatcaagctaggtaaccctaaactctaacgaccatacgaagtatataaaatagatgtgacctagtagtgtttagcctataaggaaggtgctcttggggtatagtatttggaattaaagttgggctgagcaggacgataaaccgaataccgctcttaagttcgggtcaattatgtgatttaaggtatataaaatgacctaaatgttacagatgatcggttattttaggagtaactatattatgagctttagtacctagcgggaaattgtagcctagcttatccttacctatcttagtcttagatacgtcctgtatcctttatcgtgactagcagtacgcctagtgtctagccatgcctatgtctgagataggctataatttgatttcatatatgtactaaagctcagatccctttccgattatgaatgataggctgtttcgtagcgctagcctactctatatttattctaatactactcggatcacctcagcgcttgtaatatgatactaggaaaatatatacgttaattagccgtagggatatatgggcctttacactcgggtttagcgactagaaggatatatggacagctataccgtggactatatacctttgagtatagattttggtataataatatatattttagcatatgatatctttgaatacattcaattctataaatctactatatattatatctttcgagggccaaaatcgttagtgaaatcaataggtatgaagtagagagatgtaatatcggatgatactgattaaaaagtacttttagccgtctccttcgatagcccttatcgtaataacagcaagttctggtcaagccggctcctataggaatgcaaagtgtaaccactggaatgatatacacaataggtatatatataaagcagcgggttatcggaaataatggaaaatttgctaaacgggcgaccacagaatctctgggaaataggctatttgctcgaaatgcgaggcttaccccgctggtaggcctaacggctttgaagagtggattaatctgacgatctaaatactttagtttatacggctaagctattaactgataaacgattgataaccatcctcttgaccgctatctaaattgatattatcaccgttgtcgtcggagcttttaatatcgatctaggaataccgatataaaggtttttcatttactggataccctgtagacctaagctaactaaaaattccgcgagttgcagcctctgaagctacctgggaaaataagtttgagttattttgtatcgggtagtagttttccttatatttctttgttaggaattccctacgaaactctattagagatatgccggagtctttgagcgtttctccatttgctagattccagttctaggttttgtactttaaacagtgatagcggtaagcggtatattgctgtactgtaatttcagtattaagaagtcgagtttctctaaacagtttctatggatgaatggggggtctagtatatccattataagctgtaataaatagtaaacgatactcgtcttccctgtagattatttaaccgttattagtaccaggttctacggttataaaagattggtacattcttgtctaagccgctacattgaagtccgtggctgtaagcccgatccggatatttcgtattatagggtttactagtcctaccacaattgcaccgagctaaaggctagctaatctgggctgccgatatataaggaccttggcgagtataagaggcttcttgccctagactaaagggtttgttattacaaagataggattaagccaggcgctaataaggttgcatttaatctctctgttaaagaaggtactagaaagtaaagatcgcataccccacgcattataactcagtatcatataatgggaaagatattcagagtattcctttactagatttgaggatttttgtgatagagacgatagtctatagtataaggctgatttcgggataggaagcgaaatggaatctccgctaagtaataggatataaagcgtagtaactagggccacggaacactgcctatagagtcggtaacaggagcaaaacctggctagatattctaaagtagtactagataacggtagtcctaccttagagattagacaacctcctactatccctatattaactttattggagagaataatagactaaggtgagtagtatattttttttttataatctattattatttcctagccgccgccagagtgtaatatagccccctactaagctgcttcagcagctttaatatcgtgtctaatatcaatttcgattatatcgcggtatctggtacctattataagctgaccggccttatacgtgaatttactactgtattagtatcctaaagtgtattctagtgattctgcctatcgtgtagaaaggatataagcccacgtaaggaataaaacgctaatataatttccctcgttatggttcgagataccattaacaccaggccattcttataggggggtagattttaatatctctactatcaatagattgggaatagccagcagaatatctaaagccattgttttcggttcaaggcaatattgcccatataaagtagtctagattgattgtctagtgattagaagactaaactgtcccctgctcgattccctttcaatataagtaaagggtagttcagtgtctttgggcaccagaccatatctaaggaaagacggtattcttttgagaagcgattttagatcgatggaagaaggtgggagataaggggttttatgagtatttgttaggtaggacgaccatttatcatagctttcggaaaggatacgatcgaaattttctttacttggacgaacggcattatctatatcagacttagactatatagttgagtctaaggcactgccgctataaatctagcggagtgctagactgactagttcgaataaaaaaaaaaatatctaggggcttctcttataaacgccagataattaataggtaaaatgacgtataaagctaatgatttagatgtatctaaggaataaaaatagtaatattagtaagttctgggggaagggaagttgggattgtacttaaattaacgagatggtagttggtcgaacaccctggtaatatatgtctattattactaagcattctttgtttttccgttccgaaatatcctttatatatacaatcgggaaaaaagttatgtatacgctgtaataagctaatcctactgtcgtaagaggctgctaaaaaggttatatataataacaaaacctagggtttaataactgcgtttccttatcccaattatagctagctctatagggggctaattaggtctacgttgtataataagggtattagatagaaatcaaggtatagtgagtatattggtaaaattcacaatggtaagattctctaactaaggcccgaatttgataaactagtccgatataattaataagtaaaacgcttagttaaaaaagttatatatttcagcggtaaaaagaccgggtaatcaatgttacgccttatttcttaatactaggatatagtcctaggagctagattagagttcctaagggatacctacctcctagaattgctattaaggtttctagggtcaatgtattaattactagagttaaattaataagtaagagaattcgtcgagattctgctagcccccgagttgtattttctgctaataaggtccgtctagtcgattgtactaatctagtgtaccgcctctatatatattcctaaggcaaaaaggctactatctacactgcaggtatgtgaatcttagtctgacctattctggagttccactgatcctgaagtcgatacaattttaatagaattgaggacattcaaccataacgtataagcgtaaggactatagctctttaccatctcttcgtctgtagctttggctacccgactatctaagtcatatattatattaccggtctataagctaaatatatgacagtggaaccattaatattgtaccagagtggccctgaggatacagtacctatattagtattctgtataaagctatagccgatatactagaccttatcctatcgctttataccatatagcacaccctaggtaaagtatataacttaaatgaaagggctaataatagggtgcgaatatccgattgcgaaattcgctatatagaagcttgaaacgtctattcttcccgttaaggtaagtgatttatcgtgccttctgctatactatatccagttattcgtgcaatattttgcgctctataacatgaataccattgctgatatttatactattgtagataggagcagcctatcgctatctgtgaaatatacttataaggagtccttttatcctaggtccgagataagacctaggttactataacgcgtgctctatcgtgtcttcccctttcgaccacactgcctttataccatgatagtggggtgggatattcgccatctgtatcgtgaggtcttatcctattacaattgtacaatttcttattataggtaggttcgtcgcgcgcctttagggcttagaagttacccggtatatctggcgcggcttcttcgaagtaatagccggagagtacaacgaactagatataacattatattaatatggtataaatggtgactgtattactgaagacgattgtaagtgatctttatcggtaagatatgactataaagctaattaattgactcgttctaagtaaaaattctgtgatctttataaactagtaagttataaccactcgtcctagtagtttaagccttactaaatcggattgtataatagggggtactgtcatgttcctattactcaagtcgaagcgcgcaagtgtattgtctgctcgggctccctaataccgatgcgatcctatactctatcaccccgaaatgaccattggtagtatcgataataagctaatataaagttctgatcgcctttaccttcgcccttctctctcaatcgactctgtaccttacttaggttatatactgatgcgtctacgctatatataccctaaattccaatggcttataccactgtatatcttattcgaatattgtgaacgaatagcccttatgaattagactagtggtgtctaatgggtggccctacgttattctcggatggtatctggcgtattttaaagccgaatatttcctacaggcgctaggaaataccgatgtttcgtcttatttaatggcaagggagccctaccttcgccgttagctatattgttagtccaaatccgtgtgcaaggggaaggtaaggcaaaactcccttcgtttctgacctataggctaatttcggtactagctataaaccgagaagataaggccgtttataccgaggtacagccgagctaactaaagagccaaaaataccgtccgatactgtcctatctgatcctactccgcattacttaggtgttcgagatatacgaacgagcggaaacggaccaatgggaaatatacgaagctattaagtcggtattagaaatgtctcctttagaacagatatttagtagatttggatcctaagtacccattcctctataaaaccccaatagatatctatagagtcgtatacgccttagatatcactgaaactgtaggtcattaagctggccgtatatctctatctattgatattgttttctaacctattgcgcgtaagcagctcctaccatagactcgtcggattctgtataccatacgtcggctatcctttcagtattaagtatatatttgttaaacttaccacgccctggacgacatttggtatattactgttcaagtatatcctttataaaggtgagtttcagtctgtaataataccacctagagctatcctactgcgttctatcggcagcagagtaagcttaattgtataaacccgggtactatgccccggaaagtaacgaccggcggttcggacgtagtattggatattgatatatagggtacgatatgaattatagttactaacggggggattacttacaatgttgcggtaactcccgaatataggagccgatcggatattcttggttggttttctttattgtgaatccactttcacccttgggatggttctaggatatagctatcctatagtagagtaagcttaagtgacttacaatcgccgactaaagcgatgacttcgaataagaaggcagagtctattatatcacgatgtttaattaagctaataaatggtatttcgagcggttccttataaatacttctatacctagtaggtctaatcttaagcgtatgtattgcctatatatagttgaactaacggagggcagtctagggtttacattcgaccagctcaattgaagtaggggctgtatataaattcaccgagtgattagaatggtactagagatagcttatgagatagaatcaataaattgatatatctattatatggatgagatggtaagaaaacctccgtgttatatctagggatattgatcgacctcgactcagcctacgaggcctatggattcgtaataacttacttctacctgtctataggtgggcatggcgttggttggcctatggccgcttattaataagcccttaatatatgtatttactttacaatgttttagctacgtataggtcccacaatgctatgtatttagattagttagatagaagtatatataacagaagagatggattgaactaagcttattaaagcggtggactgttgagtctgtgatgctagtggcgtacggttggataagagggctactagtaagatctgacctgaatgaccctcaagggtctgtatttttgagctccaggtttgctgaaacggtggaaactaatatatctaataagaattcttattttaaaattgtctgcgtattaccccccttctttagtgtaaagttaaaccctaagcagtgagtaaagttgaagggacgtattatcggcttttaggtctaagcgccttctgtcaatcagagtctaagtaaatacagaatagcagtcgcatttcttctattttagtcatattcgagggatattgaccctattgcgattggcagtatacggaattgatagcgttgtaaaatgtgcgatgtcattttcattagacccgaactgtggagccacgctttacttactttaagattaaaatattttatattagaagggataagatatttagctcaaccttttctattaaaacgagtgaaatatatacgctccaccggcctctaacacatatatcgcttatcggctagtatttaattagactgattgtagattaagtttcaaattccttttatccctactcagggtacctaagcggggacttgacagaagattgaactttagtctttcctttcttattcttcttcttgctacttatgcttaaaatagaggttgtggatagcggtatcggctccacagtatactgctcgatggtatactcgggttgtggagtcagttctgataacgtagggctgtacgataggactacactttctgaatcatagctactactaacagcttccacaagtagttcgattgagctgtaagagccctcggacagtgcttcctggtcctattaagccctagacccaggcctatcgtttgtatctaatggtccgattagtgtatgtgtaacctaatgtgagtttatttcccttaccaagtcctcttatactaataaaacgccggtatatattagagccctttgtcagaatccacaattttctatttaactgctcccttaggctttggctttcttccgattcacctacaatcttagagaccaagtcttcaggtatcttaaacgtagtaataggtataaagagtgctggcagagcggtaaggagttttatttcgatcacttcagtggcgacgttattaataaaacgtttcagtgtaacctatactcagtagtatcgagattaatgggatatttagaacagtatagaggtcacgcgtcttaccttatagtatacaagcatgcagtccagtgcctcctctaaagtaaatcgagtcatatctagtgtgcttttctaaacaagggagttgtaaaggccccagagattgatagtatatcccacagggtgggaggtcgaaagtgtattagccccaaagtatgattgtagagccttacggaacgcttcgttttggcgatcagctcgagtgtcttgcagggttttagtaaagtagtgattgtaagtaattggatagcctcgttaatgcgatataaggaactctctactccctttttctagggtatactgtaagcttcctagagctggtaaaactatcttattaaaaatggttttcgaggtagccccgtctgccatatagcagactgtatgttaaagaaaatcccttatagctgcccaagccctgtcaatatagctttgcgtgatatctccctatagggcgcactattcttaaaacaaatctttaacgattataggattatatattctaggcaactctcgacctcttgtcttcttaagaagtatttcaatatactaaacatattcgtcttgtgtgattgacatttgatatttagataccaatcgtctatcttcgtctataataatatatcgtgaatagccgcgtagggagatcttcttcgtgaattgcttatttaagttctgaatgactgctcggatttacttttggtagccagtgtctgtttttacatctctaaagaaaggctcgctgtatatgccttctacggctactttgataagagactggaaagcttgacctatatgtaaaagatacgacctttacttaaacactgttgcctaagggtcgccgagtttctgcagctgtaattggcaagacttgacttttatattgatctcgttaataaggctagggagttcgcttacgatctagccaagaagtagaccgctcagacgcgttctcagagagtctacgcctacaagtgatagcggaagctctttctaaattccttaggagaaaaactcgtattcccgaacgttttagtcaaacagacttgacttacctttctccgagtctatattcttcaaaatataccatcctagacagaactccacctcttgattcttagtaagcgatataaacgaagctttactctcagatcctagcactaatatattaggcttagagataacgcctagagtcctgattctagatagatcagtatcccgtgctaaatgtagaacgatctggtttataaagttattctttacagagataatagcaaggatgacacttcggggctctcgtatatacgattggactatatcttaaaccaactgaatatcggctgccgactgctgctgtgtttctaagtagatcagtcccggaagattaataattgtaagatgtggccgatctaggccagagaccttaactcgcagaaggttatttgaaaacgcttttctgtaggttgagattcctattgctgcctttgcgttctctatcaactctgtaagaccattgaaatcattgagtgattcacaaaagctgctaagcgaatgctgctctgtatcgctgcgggattgataggggataatagaaacccggactcctacttacgaattcttctgtagaactaattcggttagaaatctagtgcagagactacttttcactagaaaagagataccggagatagctttaagaacggagctttttccagaagattggtcaccgcagacgatgatctgtggaagggagacatagtggctgataccttaggatcggagggtatcgatggaatctaaaagatccagctgctcttaagtgtataagccttcaagcgcctctgtcttaaattgcgttaaggttatggtgatactgagaattggagacacggatggagtggttaatattgttagaataagtagcttaggttttaataaatattggggcagcctactagatgtgtatatttatattccgctagactgcccgttcctttctaaatatattacctcctcgataccagagtatatagtagggggtattctttctataggctgtcttgattgcgttagacctagagtgtagtctccttactgtagaactagggaggaatgtttgctatttaaaaattcaaggtcgttttgtttgatatgaaactgcattcgcttatagttactgactggctattagagatcttccgatataagctttgcctttttcggtcttttaaatagagttccgttttaatttaattgggaaatagatcggcggatcgaccaccccctatgcaccgaaaaaaaagtacgcatattatagattcgtttgctaattctaattacactctgcctattgtaagggattctagggctagtaagagcgttttctaagattaaggtatttatctttctaaaagtgggtattatatctgctttaaggttataatgaccaagtaggttgatatcgaggcaggtctttcatttataggcttttaacgttactttagaatagttaattgggagatatttctatctccccttatacgaatacttcatcttcgatagttagaactagagtcaactactgtattctaattattactataaatctacactctccttctactgtctacgagctttagtgaatcttatatctgaatagcaaaaatattcctaatttttttgactctttatacgcgataaatgcttccggctaagaaataaaagcctatagctatatggtctatatacaaaaatctttataataaggtgttaagtttgctggttaaaccagatctttactatgagttctatgagaatgataataatatgagtttaactaatatacgtgatataaatgttatgggccgctttatatatcataatcgagcttgtagagctcgtggatggtctagtaatatgatcgctattactattcatctatttccggggcagaaatataatacaagggtataccactaacgctgtaaattttgctactagctgagccgaccggtattagaccagtcatatactgagaggattgtctactagattaggcaatggaacggaatccatatggagaggcctctaatatcctatgatagcaaaggtccctataactggcagctttgtgagggatataaagctggatactgctcttaagcagatgaggattaggtagtataactagatcggtttattagttgcaagttataagagaagagctatatattaacacttttttagattgatactatagcgacttggagttggagtatggtcgaccgacgaatatatgaattaaaaaattcctttatattatggttatatcaacgcggagtcatattagaggtttaaatggaagggtaaatcgtattgtatctgttacttgtaaaactcgtttatagacggcggacttttatcgtaaaatgaattcaaaatgttattaaaatattcttattccttaatcgactattaatagacctagtatatttaatatcgatccagctcagctgaaattaacaatcttttacccatttggacccagaaacagtttgggaaactagggataacaatctttttccttaatatacatatggtataactcatactccttggtttatgaaaaccttaaattgcagttcagcttctctttattatactatcactctatgtttatatatggaatccttagagctaagtaacagttctagattgggagatcctttagggattgtcactatatcttcaatttcgacttcttacaaccgtagtctatgagctcgagtttgatggccatatattagctcttctaccactggatttgcctttatataaagatcgcgcaatggcttaccctgagaggcctctaggagttcgactaacaatttaaagtccgcctcctttaagtcgtagatcctttaaaatgtcagttacctataggtataatcccgcagggtatatatatattatctgaaactcctttgtccagctctcctattaataagcatggctgtaagaggtatattatactctgcctaaaattgtttactagggtttggtatcgttatccgatgattcgtaatcgcgttattgccctacgtcttcgtttgtacttaggattatctgtcgataattgtggaaagacctcccttatcattctctccgtaattatagtattgttattgtgatttaggttgccctttttttgagccttaggcgggaaggattcgactgtataaaaaaccgagtttatagaggtacggctttgaagccctctatagtctcgaaaaagttctattaggtggtagcgtttgagaagaacattgagggcaaactttctatcgagacgatttataatttcgtatcggtccttcttggatgtctgtcgcgatactatttctcctgaggataagttggagcttagtagggcattttttagatagataaaagcactagcattagtaatataaatgagaatggttcctaatgggtccgaagagcggagtgtggttagaagcctttgcttgatatatctttggaaatatgtttcatacggtaaagggtgcccttttgcttcgcatttctggctttccctctctagaaagccactatacttgatttttggacttatcgctgtatacttctctggtctattactcagttgggtactgctgtgctgttttctagagacttggctgatatatagctctttcaaaacttaaacaatcgctttactttggttgctaggctctaggcctgcctaacagtgttccttaatacgtgaaggtagatcttataacgagaggtaagcggtcataggaactatcggtaaggaataattataagagctataaaggggatattctaaatctagagggataggtacattcgtcgcttataggacctcgccctctggagaacagggtcgagaatgattcacagaatgtatatctaaatcatttaaagcctaggtttccgggttatcgctaaaggttagcgatagaggtatagtgatgtccggtatagagcttagaactatctgctctgtaccgacttaaacgctattaatggccctgttattaggagatggaatagatggaagtggagttttatgtagtggatttgattagattagtgagatgtcgctagtacttggaagatatctaggcctttagaagtcttcttctataggttgagcggtagtaatctcgtaagcttctaaaagcatttttcccttgccttcccgaagaaacctgtcctagaattaatgatactttagataaagggcctaagctaacttacctaagccgcagtatactatctaacactagatctaaactactggtccctatcccaattactgctataagggcgctaacggccgaagcgagactattcttagccctatgtctactcgtgctgtatttaattaacttattaatgccgttcccttgcgcaatataggctcgactcttaacagtattatagtcggcccgtaccgctgatatcaatcctgtattatattagaaggctttcttcttctctgattctttaatataccccttgttttggtagacttagacgccttatgaccaattttcgcaatcgaagtattaattaaagatattccgatttgtgtaagtgttttgaagctatctaggatatttggattaatactagcggctgttaaagcttagtgtataagcttattaggcagtgcctaaatgccgaaaagagctcagacttacttagccttagtaacgtttattgtggtatttattgtgctaatttacttgtgaagagtataggaagaataactaccttcctccgctataattagtgtgatttatactcgccaatatatatataccgacttttcgaaacttgtatagttgaggaagagaatcaaggtatatatatattcaatataagtagctaataggaatatagctctataatagtagcctgtatagagtaagctttcatcttcctgctaagccattagcttagtaggtcaaatacgtggtataatatataagaatagtattattatagaaatcatgtgtaagaaaaactgtaacagagaatttgctaatgttttaactctatcctctatattgctataagcgatatatattgggttcctactaaaaaaactaggctgttattagttagatattaaattgcctgtggtgactgctagctgaagttaataacttaaaagaggcggtgaaacggtttgtcctatttgatatgccataaggggtctagagtactaagggctttatactgtactatatccaggactatcgaccgacggttatcgatagtggctaaagtagggaatgattagcgtagggatgctagttgcggtttttgtaagaccatctcattagcgattatacgggaagtcttgactctttcctgtagctaatctacctttttagctcatttatatggctaaaaacgattgatggactgcttatacttaataccagaccgcttatattacagcgtggtatatgaagtctttaagtatgattcgttagtccgtctatttgtactaagaaagcagagtttaggatttgtttctaatccaccttatatatatttacttattatttgatcgcagttaggcgaatatatagcccgataatcagtcaagtatatttttagctttaaaactccttggcctatcccgcctggtgattgcttatctagagactttatctaacggatgattgaaaaaataaaaaaaaataaaaaatgattaatcgttttagtttttaattatcccttgactcgaaatatatttatcgcaataagataagcttttttagttctatttcactctaataaactaagagaagatactaaatagcttttcagaccatttaggttcttagagaatactatcggtgtctacatcctctatagggaacggtacggcttggcgtttatctttaaagactaggtaatgaatgattggaatcacgatatcacttattctgtgaagattctgcccctaggaagctttaagtatattgataaattctcggaagatctcaatgcttagggcaagtatcctgtatttattaacacttatctttcttagtaatcattaaagcagggagacgtatatatttatagaaatttttggcctaggactatcatagctgctgtaataagataacagtctaataatcctatagccgaactgatcgattaagagctatagcctctgtccaagtcttcgtaaatctaatacttttcgtcgtttatatgcgttttgttctaaatcccgtgggcatgggaaaattctttctattatcgagtctgtgatttcggcttctttgtttttcactaggtttcctttcttttttggttgagacctaagttagtccctgttaataataataatgttggtatagggggattgcatactgctactatagctacggtatagacagaccgtgtggtatagttctaatatattagagtggcgaatagttccttataaatctttaatgacttggagcctaatgctgccagataaatcatatatataccgttccgattgcgacttctctataatgacctgtaaggagcgaagagcttcctaaagtgatacaattgagctggcactagctacctgtaccaaaatggtaaatagtctattaattgaaggcttcgaagaattgaccaaagcttagagtctcagtttaatctctttctgaaagaaagtgtcttatagaggaagtaatctactttgtctgcatttcttcgttttatatagaattgatagcttctagctattttctcctgtttaggcgtttgtaatctttactttagggctggtaacggtgacttgaggtttcgtaggtagttgagcggaaataccaggcgacgaggaatctttaagtgtggtaaagctacagcctatagaaagttcataggcaaaggcaggaaagcctatagagagtgtctcaagctatgctactttaggaaaccttcctagatccactaactgattatattccacgatagttatagacggcaatgatatacccctgggatttccaaatgataagtacgatacctagaaggatatgccactattgtatataggctctatcactctttcaattcctttaaatgtataatagaatgaagatatatcgtagatctcattgccctcggccgctatatcaaactcccttatttctatatcgagtggaatagacaagtaagacctagtacaaagttgttctttaaaaccggccatcaaatccaagctatctcgatttatatcgacaattctattagggttttggctagttagttaaatcattggttctatacagatatatgtaccctaaaagtataatagcccttaccacgtcttctaagttttgtattacttgccatacagctctaaccagagagttaagggctaataagagctgtaaaatagtaaattctccacttagaaagacttattctaataaagctccgatactggattgccttactataaatgcctaataggtcacgtccttagcttaagctgttaagcttgccacaatatctttaagttatcagactaggtgtcttccttctttaaggagcttaccttaagatatattcttcttcgcaccaatactagtaatcaaaaaactaataacagtctcgcctacgtgtataagcgcacggtttatacctgggggtagctcgctagtactagccacagtgaatatttccgtaatcacagtgttcgatagtacctggtagccgataagcattcgaacggaggtagtgataattgaaaacattaatactcaagtgtgtagacgatattactaaatccagagaataagagctacctgtaggctaagtaggcgggattagcctacatttatgtatctttagctccacaggtatagtcactgattacctaattagatatacgtagcacgttgctaaatattgtggagtaacacattattcttggatctaatataagtatagactgaccattccgaccagaccttataatctcactagagctaatatgaataccgaaggtcctcaatgatattatttcatgattccatcagatgtgggtcttacaatgaatgaatctatctacttctaggttgggttgattgtactttcacgatatcaaatattggaagatttttgtttcaatatattatagcctttaatacgacgataaatagacgctttgatttatctaaatagcattttcgattatctgtaaattctcttctacctagaatattgatatttgttaagagaaatggtgaaagaccatgcttacagctcgtcgtagatatagatttagccgtttactttcttttatttcttattgagctttgtcgaaactagtttaggggacttaaaagacatatacccctagagcatattttctatgatctgatgactcgttggacttggttagcctaataaaccgctgattatactctaagaccagaagctataatcatcaatagtcttcaaacgatctttaaggattgaatgaggattaaacaataaggttgtggttagatctattgctttttgctgtatatatctagcacaaattatcctcgcctttatttaaagtgacgttgcgcttacctagctccctgactctaaagcagcgatatatataagcctttattgagaacctaaaactctttttaatcttttggaaatgcgtatacttccctaatacttgctaacaatctacggaaccaacttatttagtagatcgaaggctgccacagggtagaaatagtaggtaacgtttgctacagtttcaacttcgaattttattactatatcgtccactagccgtttccaagcaacctagcaagcaaattctttatataagcgtctatttagggcatgaagtgctctactacttacctaccaatatactaaaatgtaatctagcgattccttaaatgtaaactatgctatatataggatattaaattagaggggtgattttttaagtcctcgaagatcaattgaataatggcagacctgctattcccttattagaaaaatcgtatagaagtaacgcggaaacgccaagcgtaattattcattttctagtcgatccctatttcttgtagagcctcgatatatttgtgattgcatttgatagaatcttatgtttagtatgttattagtcgctctgctatcccttttccgaaggtttcctgtgaattttttaaggctataataacctttttgtatagagtcgccgatatagcctgataagctatataaagtatgaataatgtgatgaaaaagattatttgcggcaggttagatagagaaaatatagccgagatatatattactttgtggttctttttttgaattcctaaaagaggtctcttgttctgcgaggaatataagctcccgttagtttgcaggtatatataaagataacaaattttttatctctatgatagattcttctctgtactgttctttcctgctgtatcgaatgagcgacagtggctacgtcttgaatttctttagcgaaatctatatccgtatccgagtactgcatgaccgcgcgaatgtattttgtatccctatatgaatttggaaattccccaatccttagataattttgactgtagattgaagtaattagcttttgaaaggatatagtcttagcgttcctaatgttactggccctttctgaatagctggtttaggtttgatatatatcgttttatcctttgttaccttaacgaagctagagtagttctactgtagatatctaacaaataatacgccagtcgagcgcgcttagtgtttatactaataagagattgaggtatgtctccttagtgtcttggggaaataactttaattatcggaaagttcgcttaggtagtttctagtgacttctatcgagatccacattcttcaaaatatggtatatacctccctggcattcttatctgcgcgaattatatatatgataaatcatatttggacggtcgcaagtattatataaccttagtaccgaatttcttctgtggccgttagtataacctataatatggatgtaaatacctagaacttaccatagttgcctaggtagttatatggtgttgtaacctttattatttttgtggatatacagactgtcacgtggttaatagctgcctgaaaggtcggtcgaccttgtacactgggcggtaatgatctattatttattcagttcgcagtaactaagccactaagaacagactgtatactacttcttactgtgcttcgagttatatgcttctagtgtgtcttaaatactatattgagatgttcctcaatctattaccagctgatacaaaactctctatcctttttcgcgctgagtgcagcagcaatataagctttagagaaggctacttatatatacggaaaagagacaaaagcctgctatcgcggaaagactttgataattatttctcttagaaccaaaaacccacgcggttcctatccttcggtacttggaggtaggccatatagtaacgtaaaatactagaggatgaaggaagagttgatattgttatgattgctgtgtgggtagagggtttggtaggcgtatatagtgcggaggaagctgcttctaggcttgaatatattgatatagggctgggtctaagaaagtcgccccactataaggaataccttattgaaggtggcattgctactgatgaatatcgtatccttgcggtcttcgaggggggaggccttgaatatgatgctgtcttcgaatatccttcatatcggatataagcaacaattcctagtctatgtttccttaggcggagattaagctacgcactggaggatatagaatatgagatctacagtcattcgggagttcgcgataatatgaaacgagatgtgcttgtggaagtaatcataggaaatcagctgtttttcccgactttgcggtacaagtacctagggtaaagtgaaaacctcgcttaccaccgaaccaagtctatcactaatcaaggatatcggaagacctaaaatcgttatatctcgaataaatttagtatatgattgagattggatcacttaattgctctgaaattacttttattgctaactgttgctattaaactatagggggcgggggggtggtattttactactaaggacagggttatttgtcattctctctttgtccctatatagtaaacggggtacgctcaatataccagcgttatatcacgctgagaacgactcctgagatccgataacgctttaacagcacgatctagatagaaaaacaattaatgtatctcaatgggacacctaatactagtatatactagtatctgtagcgaaaagaaagtataattttggtcatttataatgtactgagactgttcttgctgcttatcatttacgaccatagtatactactaggaactcgagtttcgcgctattttgcagcgatttaggggttgattattgcctagcttaggacgcttgagctgagagacttaacttgggataacaacgaggcgggatcagtaataatatataatatgtctagaggtattactaaccttgtccgtttgtattttactattcaaaatcgaaatgtgattatagtattagaattacaacagtggtgaggaagttctaaagttaaaggtaagcattcgagtataattgtgtgtctgagagtaggcctagcgatatagttttatcctatcattctagaccaggggaatggtctatatggctgtaaaatactgcggatagtgtataaggacttatgatactatatacgttcctatagggagataggataggatagtaaggggactctgggactgaaagtatctggaaccttgttagctcaagagaatatgtatgattgggtttagttgaatcggtagtcgaaaacagagtgatctatagagtgaatctgatttgcttttaacctacgcctaagttacaaggaaatcaaagttcggcacagaccatggaaccacgagcgggactgccaattagtagcgggactgtaaatcatttcgagagctcgtttggatgaaccatggaaatgccgctcggtgagagaatgtggttataataaagaatttaagtctaggagttttcctacctactttctgggctgcttgtgattaagcctttgcagcctaaaaatgggaactagaaaagaattactataatctccatcggccggtatataggataaattcactgcggtaagactaatattttattagaaagttcctttaaattcattatcttgatcaagaggcgcagattaattgaaataaagtttagggctgtaggagggccggtctacaataaaatcttatctgggggctaaccggttttagtaaaacggaggtattttatttaagcttatatggtttgtctataattggtatagttctttacaatacgtctgctagagttattgaaatagcggtagatttggagatatagagaggaagtgttgttatagcctaaagagagcaataatcatcggcttattgcaggagaagatacatagcatctagaacgtcctatagactagataggcaaatttcagcttaccacttgataggggaacttaccttcttatgactgcgactaagaatataaccatagatcgggttgtagcttaccattgtgtcgctaaagtctgcgtgttattccaaatactcacctgccccagcagtacctcctaggcaataatcccccgttctatctaatcctgacagcggctaactttaggcttgtagatcgtatctggacctttgcaattatttccattttctctctataaatagaacctccctgatctactgttccgtgggtcgccgctgagatctgcatcgcagaaccctacctgcgtctatctaagttcacgcgtggtgtttgattggcccgtcgggtgctattcgtctccagggtctcatcagtgtgatagtaacgttgcaatcttgggagggggtggcgatcataagggcctagctcgtgggccttggttgcatcagttcacatggttgtcccggaaactagacctagtttcttgtctgagcttttcaaaggtctgggccctttttagctatcatgccaaagaaagacaatcttcatcctgagattcaagtatgccaaggcctacgcgcccagggagtagatatttagtaaagacaacataagtcagctgcgagtagaaataaaagtcagcggcgcgagcctagagataaagggttgactctagtgagaccaaaatgtcatccggccaaccccaggtacagctcagcgtttccgtcgaccacaaagtatgcagcccattatttcggcatctgtcgaagcacttcaaccctcattaagaaatggtaaccgtggttaaaatggggacatgtagaatgtaagcgcgttgagcgatttaattgcaaattcgatgatatgtacgaaccatacttttgcggcgttgctttctttttaacagttgatgaaagtggttcaccacactcgacgcgcaattttgggaggaagtaggccaggtcgagacttggctctgtaggccacaaagtctccaaacacccctttaacgtcgttgaaatcgcttcaacgcttattaacgagaccgtgactctcgctaccaactgcgcaactggttccttggtagagacgtagccgaaaaaaatataaaaggagccggattcccagcctaaaaaaaatcaggacttcggtcctcacactccgatgtgtcatggtgtccctctcttgtctgcgggcttgagagtctccgtgacgacggctgtcgctgccacgagcccagtgatgtaagacttgcgctccctcgctgccacgagccaggcgagtgtaaaaaggtgcttcgcaggataggtctgcgtgaacaacaatcctcgcagggggggcgctgcgttaccaagtgaactccgcagggggacgctgtgatgacaagtgagacccgcaggagaccgctgcgttaacaagttctctgcaggagaccgctgcattaccaagttctctgcaggagaccgctgcattaccaagttctctgcagcctaggccctgcgtcaacaaagcgcctcgcagggacatctgcgacaacaagcgcctctagcccgtgcaggcacctcttcgtggtgctagggaccagtattcgagtgttccaagagtattcggagaagcaaagacctgcgcaacatcttcatcgtctgttcattgttccgaacggtcatcattggatacatagaaggggccctagttagatctttgctaatttaatagccaaaaacataaactaacaactgaagcttcttcagtaccaaatgacgtatttcacattcctttcccttggtagcttgtgatgcaatagcttcctcactataatagaaattggcatctttcatccagatgtatgcaaacagagatgagtgttgtcttggaatgcttgtggtgttgaaccgttggtgttcaaccgttggtgttaaaccgttggtgttgatgtgagtgttgatgtgagtgttgatgtgagtgttgatgtgagtgttgatgtgagtgttgatgtgagtgttgagttgagcgttgatgtgtgtggtgatgtgagtgttgatgtgagttgagtgttgatgtgtgtggtgatgagcgtggtggtgaatggtcgggcggtgaaggaggtggtcaccgtctagaccttgccatcggtccatgccaccctcagattatgtaagtttcctgaatagggggttcaacttttggaaatctatcacttatcacctacccccaataaccactagtatagcagataattgatcataataaaggtgaaccctagtatgtagtataactaatatatcgtgtttataataaattactaatgggctggtaggcattatattgtaagtggttttgtagcttcagcatgttttgtagtcatatatatatttacgcgcatcacaatttctatgtatttcggatcacactttcaatttcacttagactcgatagtccattgcttttactaggtttggttatagctgaacacatccattgtatacctttctactcaaataacctgaatacgtagcactataggacatatacgtgcgtggctaaacattataaaattataaaatttcatatgactgaagtgcttattagtaaacgacacatgggcccattaaatgacacggggctacggtcaaccgcctgcccataggcaggggtgaaaaaactcagtgcgaatccatgggcctcatggcccgtggcgaggtctatcaatgtctcaccgacatagtacggagattttcatgccatctcacccacatagataaatgtgtcaactatagattctatctcgtaagcgaaaattctagtcccattctgatcactcggtaaagttggcatatagcgtcaatccgatagggatagtagatccactggttcaactatgaccaagcaatatgccaaggcccacgtgtagaagcatgtgataaggtgaacgattggcttgaggaaaaccagctatgcggtaggctttgtgccttcctaagtcgaagtcatcacttcaggtggcgattgtgagtcactcgaccttaccctatttcagctcttatatcccagagagcgcaagaatcaaagtgatattaccagacaaccatgttactgagagatttggacaagcaagcaatcaagaatacccggttggctcctactatgcctcggcaacgacagatcatatttcaaccaatcccggatcgaagtgacagcaattgccttttgggaagtggtgtcctaagttaatgcaatcaaccatattctgctgataagagaacacggctgaaacccgattgaacccgattgggttctagcagtgccgtctgaacaaatttccattgggtgatatccccgcaggagtgctagttcgctcgtagtcgtagtagacaatccggccatccttacaaaatcaaccatcatatgagtgttgatcgacggtagaaaatttgctcgaggatctaggggatagtccaagaggtcctataaacagtctgattcgatattattgcggataccaaagtctttacagtggctgcctggccgaatagtaacatgcccacgtgtcctccgcagcgcggcgggctcgacgaatatatgatttaaaaaaccgtcgaaatagggatatagggaatccggatttcctgataagtgcgtgatatattaggagacgatataaacggataaaggatatgcgcagtcgacttgactaacctgtagctgcagtgacacctagggtaaatggtcttaaacagtctgattcgatattatttcggataccaaagtctttacagtggctgcctggccgaatagtaacatgcccacgtgtcctccgcagcgcggcgggctcgacgaatatatgatttaaaaaaccgtcgaaatagggatatagggaatccggatttcctgataagtgcgtgatatgttaggagacgatatgaacggataaaggatacacgcggtcgacttgactaacctatagctaaagtgacacctagggtaaatagtctttgcaaatagtgcttcagcttgataggaaatgcgtatataagaaccaaccgggtataccacaacacttttgacagcccttatgatatagcttcctatatgcccgaggtgattcttaggtagtgagctcttattggcttacctgtgccccgatcctatcctctcggtttgtacctaagataaccaatgttaaattgtaggctaaaaatgagaagactttgcgtctccttccccttgcaggtagacttgtgctaacagcctgattatctgcggaggtacactcatctgctaggaagcaagacaaaacattagcattcctatatcttttggatttctaggcctaggaagccaccaaatgtcatccgaagataacgaggatcacgcattcgataccagcagcctacgccacttgaagatattcgaaaggttgtatacttagccacaggtatgattcgggtagtagtataggctgatcggggttcaggagttgtatcatatagataaatcgaacaatgacctgatatacagaatcaatagggagaaagaggccgaggtacgcgatacgaaccttctggtaacttatcgtcgatagtagacatgtggaagggacagagagcatgcgacagtatttgtataggggagctaagataaccaatgtcaaattgtaggctaagaatgagaagactttgcgtctccttccccttgcaggtggacttgtgctaacagcctgattgtctgcagaggtacgctcatctgccaggaagcaagacaaaacatcagcattcctgcgcctttttccacttctggaaagacatcaaatgtcatccgcagacaacgaggatcacgcattcgataccagcagcctacgccacttgaaggtatttgaaaggttgcatgcttagccacaggtatgattcgggtagtggtataggctgatcggagttcaggagttgtatcatgtagacaaatcgaacaatgacctgatacacagaatctagggagaaagaggccgaggtacgcgatacgaatattctggtgactcatcgtcgatagtagtcatgtggaagggacagagagcatgcgacagtatttgtataggggagctcgagcagacaagacatttgttcgcgtggtattcgactcgagtgatagaaatgagggtgttctcctgttatacgatccgagtcagtaaggattgacctagttggacgagttgccgtagcgtacctgtccattgaaatcccaaggtgcgcttgagacgggacaatcagtttgcacaatggttatatcggcttcacaactagattacttacagctctcagcaatgcagttaccagccatgccacgtcgcattcaagcttatcgcaatcggctgtcgcttaaaaagccgcgctggggtatataagacgatttgttgagacagtaaatgtgtgttacgaacccacttgcgttaacattgtacttctatggtggatgaatgtgttgcgatgccagaggttcaggactccacaatagtgcgaaggcggtggggacgagggcggaagacgcgatggagcacgctcgtcggccgccaccttggtcttatcttcgatttggcggaataggccactcgccatagtatatttcaccatcgatgatggggtgcccctacaatagtgtgaagatgttagtggtcattaagatgaattggagtaggaattatgctcgaggggcatttatagctgacaattcacacgaggctgctgttatttttaccagtgctttatcacctaggatcgactgcattttcgaagagccagtgaacagttagttcaactattgatgctcgatctcgccagctgctcacctcgaattactcaccgatatacgaaaaggggggggggggagagtaaacgttgtaacatcgttaccgaacctacggaagggaaggtagtttgtaagtgtacttctggcgcattgaatattagatattaagtagacctcgttgaaacttaaccgtgacgttagtttgactgtaaaacagttggaacggagaaaagcagatttagtgcgtttgagtataatatagataccagttgacgttggtaaccgccagtctcgcattatactacggacctactaaacctaggctactaatgcttcttcttagtgaccgcaccaaaagcgtttgataagtgttattatattattctgttttgaataggcctccgtatattattgttatttccaggtcccaacgatctcctcaaaactgccgtcctccttccatgtaccacgagcacgttgacaatggatatggggaaaattcgctcttcgggattctaggggcttaagcgaaaattctatgaattcaaaaatgcttttcttctcagtatctgtcgatcaaagtccctactccttcagttgttcctatacttttactccttaatttgaccacataagagtggggacgcactggagaacctgggggtggggcaatgagcgcgacacaagatttagtgtcgcgctactcctgtttatccgtgttttcgtacgcctactttaaggagacaatgtcaatgagagtttcttgatagagctatttagagtatggaagtgataacgtgaaagaatgtagacaacatgttattttcagctagctcagttcaagagtgaaagtcccttggtcctgcctgcccgaagaaggctccatatggaagagggaactccgtgagagtaacccacttttggtcctaccgttacgattgcggatactacgattagtcatcaccctgaaagtcaatcatcgactaatgtaatttcgtcaacagtaagctggcgaaagagccaaaactaagtccaggaattagtggcaccctgatacaaaaagcgtgtcgcaacgtgtgtcgcaacgtgtatcgcaagggttgcgcgcgtactgcctcggcttttatcacaatgcaccaggggactatttaaattcacaactgtaccataccaaaccatcgcttttcataatagcttagggctgggaataacaacctttatattatcctacaatccttataaatatcaaaaacatgaccttctctatcttcctgcttctccctagcgtttacatacgcgctgccttctgtggcatatatacagttatcgattatgatcgccaatgtatgatatggcctgatagtaactatggctgcacggaacattcagaaccttttgctctccttgatggagatgactgttctggtgagtgatggctctacctatatatttttagtattaacgaagccctagatctcagcaaggttacatatggtatccgtaaggaccactctaaggtcgatatgggtgtattcggcacagtgtgttggcagctcgtgtattactcccgttctgccattatcgtattcatcagtatcgtctgttttagacttgtcttcgtgggggccgtctccatcctccacctctgaatcatctagatagatctcaagctgtactaagtcaggataagagaaccattgggcgactatgttatagttcaaccgccgtccccggctcttgaattgacccattatcccctctcctcttttgttctgggttttgcctaccggtgtttccatatcactagcgtgaatgcgaaagaggctttcttgagttgtgcttctttacgaatattaggttttcttttgccgagtaacctcatttgttaaaaccagtttatctatttgtatgtacttgtttggtgtaaaacgctgatttggtagcttttcggattggataatacagcgtggatggacggataaatgaatggatggatgatttcatttaccttggcccttcaggaacgatatttattcctacgatcatgtggcaagaatgtaagccgagatagaccaggttacatcgatccctgacgagtgaaataagtgtagattgcaaatgatgtaagagaagtattctgacattcattacaccaaatcaccttgcatttgatgggtataatatgtacttgtcaaatccttcgggaactagaggtctattttcctttgaatgttaacgcagtatgggcaagattgactatagccctgaccttttctaccgtgagcagggtctaggtatcgtgaaacttctcctaacacgaagggcgattgagtatcaagtctcctagcgaatctctgcatcttgtttgacaaaaatgttggcattattacgtgcaagatagtgactatgtggtcatatttgcatacgagtcgagctacaatgaggagaatgaggagtattttaagataatgcaaatatatgctacggacggggccaagccgctgaaggccctacatgacatatcctgccaggggattggggaaccttgtgcaaattgcaagcacaaagtacgctgtgaaaacctggccaggtgctatgaccctgtgcctacctatatgccatctttatcgctgccattagtggaaggtctggtgtcggtcgacgtgcttctgtgcgaaagagggccaaaagctgtacaagatcatgtggttgccaccattcaagcaggaaaagcagatataactgatcatggcagcgagaaccatctacgtgtacaatacatgtacaagttcgcttcggttaacaatatctctataggatcgaaccattcttctgcagaacctcatccagaggttccgcaaaatgatctgactccattaatatcagtctcgcacgcatatgtgaagggataatccgtactcctttcatccgtatgtgggataaatagacgcattgggatatcggaaatcttcagccttcgaagtctcttatatgccgatgcggaggttttgactattagagagcaaccaaacgatccaacccggttcataaaacagattgagtgtacggaaaggggacatcacatatgaaatacttggctatccccgggatgacattggtagcttatgcaatgacgtactcgatactggaaagctactcaagattgattgtgtgtatagcatctaactgtgctcatgttttaggtgattgccacacggtcgaggctgagccaaatcgcgtaccccggtatatggtttctaatcatacgaaaacggcgacagggataaataaatctatgttaacccacaatacattctcgatatctggtcgagcggcggccctatcgagtcgggtatcgattcgatgctgatcacatcgcgaaatggtctggcggcacggaatctggttggttgggggagaggggtcatgtgatcgctgttcagccaatgaacgaggaagagtccgccctattgcggacaaggatcccggctccccactctggagaggacgagaaggcactggagcaggcactggagtaaattccgctggcaattacccaggcggggtcctatattgcgaatcgatttcctcaggtcacggtcccccggtgccttcagttgttccgtgagagcgagtcgaatcaggcatatcttcttcagcacgaggacgctaaggacctccagcgggaacctatcattcggcatgcggtgaccacaacgtggcagctatccttcgaacaaatccaccatgaccggtcggcggcggcggcggatttactggtgttaatgaacatgtttgatccggcaggggatcccagaaggcctcgtccgtgccgatggtaataggctccagtttgaagatgcaatggcaccatcgatcaattattctcttgttcatatcggaagtgaaacagtgtcatttgatatgcaccgacttgtacagttgtcggtccgcacctggcaagagattcacctcgagctggcgcgatggcaagagaaggcacgagcgaccatggcagagatgtctcccaatggggagtacgagagctggactgaatgtaaaaggctgcttccacatgcgcaagagggggtaaaacctagtttcaacactgatgaggatgattccatgaatgatgccacgattttatctacctgtggatggtatttacatcgccaaggtgcttattttgacgcagaagcgatgcgtcgacgggcatttgtacgacgagcgaagatgattgggccggagcatccttacacgctcgccagtgccaatcagttaggcttagtgcttgacagtcaagagaaatatgaggaggcagaagcaatgtaccgacaaggactggaggtccgagagaagcttcttgggccagagaaccttgacacgatcaatagtgtcaataacattggccatctgctacgcaagcaagggaaatttgcaatggctgaagcgatgtatcgacgagcatcatgttacggccaacagtgtcaataatgttagcttagctcttggtagccaaggaaaatcgaaagaggccgaagcgatgcaccgacgagtatcgggagtatttaagaatctgtttggacgtgagcatccccttacgcttacgagtttcagtaatctcggggatactctcgacagccaaggcaagtatgaagtggcggaagtgctgcatagacaaacactagaagcacgagagaagatgcttgggtctgagaatccggacaggcttgttaatatcaatactctcggcaacgtgctcctcgctcaagggaaatatggagaagcgggaacaatgcatcgacgggcactagaagtgcgacagaaggtgcttgaatgtgagcatcccgatacgctcactggtgtcagataccttggcaatgtgctgtccaggcaggagaaatacggagaggcaggaaagaggtatcgacgggcactagaaggatatgaagagatacttggtcgtatgcatcctgacacgctcacagtaacattcgctacgtgcgctccaagcatgggaaatacgaagaggcggaagcgatgcatcggcgggtactacaatagaatgacatagagagacgtctggacgtgaacatcctgttgtgatatgaggttggtgcaggtcaggaagcgagccgcaccatcggaattagctccgagatgtctatacagacaaccaagttgatttccaatcaacttggactttgtggcgtatatatagcctcatgcttccctctaagtaaataagcaattgatatacctcttgaattacaacaccgacaacgggaactttgccaaaggcgctgtatgtaaactgtggacctaaatcaaagtcgcggataattagaacaaaaagaaatctcagtctcaatgcgagcgaacaagagaatttctttgagaggttgtcaagcggacgaagtccctcagctcaccagtggaggaagggtgctagacaggagcttcggagtaacagatgtgtaagctatgcagaaacttcattgcgcagagatcagagcagacccttgggcgtatcaacgactaggttattttcacagccgggattataaaacgactattccatctcactttcacgataagcaagcttacgccttatatgctgtgttcttttatggcgggtaacgtgtcagacttccgtgacgtagcttcccgacacacggccattttccagtaccccaagcagatttagctccaccaaggaccctcctagtgacaagtcatattatgaactgccccggatgaagaaaatgggagattccgcgcccctatacgtctacaagattgtcccttctacaaaccctgttcgagaaccgcttcccgagcgattaccagtcagccatatcgatcaatcttcagggttcattcaccttttaacagctccgcaagtaccaattgctctcaaagctatttttgaaagtgagccaatggtatatgtcttccggatcccgtacaataaagttatgcaagacattcgttgggagacagcggacggtgcattgcgcgaggctctgcccgaagaggatttgtgtccagtaagtatctgccggcgtatccaaccttgggacttaagactttgtttgatcccgtgtggcagaatgtgagctcaccaatggagtagcatttgtacaataagttcaacctaggccgagacgatgtcgagagcatcgctgtgtggataaacgagaacgggtgggaaaaggttctatcgcagactggcacgtggcttttatattgagggtagcctttccgcctatcttgttaatgtgcttatttgacaaccatccaattgagttgcccttggatgaactgaaactgttccacaaatcaactgcctcatccttcctttaacctcgcaaaaagggcttcagtgtcacccaagtgaaaatcacacatcttgaagcagtgggcatcaccactcagctagactagcaggagcttatctgccaaaatgatctttaccctacaccgcatcgccggtcggcacgactgaatgcccatcgattgtagatggtcacggttctctgcacggatgtgacaagatggagttggtatagagaagtgataatcatccaatctcctgtgacgttgatcagactaagaagcccgagtagtttgcgagggaagcagcttaatccatagccgggatcaagggaagaagcaagtgcggcgggcatacttattacgatattggtctgttgattcaaatatatccaccaaatactctggagctcggaacaaggcattctgcgggtcgtagaggtttttcgtcacatgtgttagtcaactaattagtccctattattgtgatatcttggatacgtcgctgttaacccactgcaaatcccagtggcagttgtcgactgcccaagcagtcgatgcgtgaaatgagggatatctctttcgatcagatcttagctaaggagctaattagaactgcatggtgctgtgccagcataaatctgccaagggtttcctatttcggctggataaaatgctaggttggcatgccaggataccttttttactactgtatccgcaatctaatcacatatctgtatcaattcatttattttatattagacccatccaaataaaatggcaatatcagtgttgtatatactcgaaaatccaatagaatatttcggctgcagtagtactgaagcgaggcttagtttagatgtcggataataagccaataaagatcgagtattcctagtttacatcccgtgattatgatctacaactcttatagtacttattcccatataccaatactctccctatttgccgccggttgcttggcacgctcctccaatataaacgggcctttttttcactcctttactatactatcgcttccttcgttatttttgaattagactagcaggctacaataatgcagcatgaaggagctatcttgatctactgagatgaaatgttcggggtgagaatcaaataagtggatttgtctaacctaggtaaacccccgaaaaaagaatgctcttttaaatacatgcttgggacccggtttactatgcctacggcacatagacctctgtcgatcaggggcaatcgacacgtgtggtgattcctattggcttatccacatgggacaacaaccaggtcagaattatggaggtttgcgatgcacctcaggaattgaattcccgagagaatataattaaggacaattctcaacattaatgagtcgtcaagccattggttcattaactaccccacacccaaagccgaatcttcacctcaaataatccacgaaccatgatcaacggcgaccaatattctgacgtatccgcaggggaacagctcactcctacgacatgggtcggaaatgaacgccgcaacgtctttgaagacgtcgttgcagatgagaacgtgttccaatttattggctctacaaaggggcatacaacgaccgcaagatcagtcatagccaagacgtaggcgacccaatgtctaggagatgcgtccgaaactacaatccagcaaatttcaaaggaccgcatcggaatcgcggcgaatattcaacctcctcatcgccaaccgcaaacaaaacctttcgacgggcccggtcgcacagtaggttagcaatgccgggtattttacctcgaaattctatatcttcatcatggatactctgatcagaatcgtcttaagattaaaagtacacaagggagggaagggggaggaaggaaggaagcgttagcgggggtattgatagttaagataaatgatataaatgggatgagatcgtcatgacgagattaaaaaagggggggatgggagctaatgagattatgcaggttccaagtctacgtgggcattggaatagataggagaaagggcgagagcggataacggccgagtctcctcttctcccctgcctacaacatataggccgaatctagaatttgatgtgcatggatatgcatgtaacctggaacctatactagaaagggtgaaatgatccgtgtacttcgtaactttcttatctttgctaaaattaagttcctagtatggatggcgtaaactatctccaactggcatggcgagtcatccagaagtatagtctcataatcttataggcttgctatataattgttcaatttattacttaagccacatagggagctagatgtagatattctgcgtgagtaacactcttcaaggcttgagaagcagcggggtatctataatacgttacacgcttacacagaagcaatgtcggttttcctcaggctattcgattcctagaagcggcttttgtgttccattggcagaataaccatgtcaacagatgcagttatccgttagcaacaaagtagtgagcaccctccgccacatctactacctttccgggcttccacgcctcattttgtcattcttcaaatattatcatcccgccgcaaacactatgtaccagtgtcatgataatcagtacagatccaaacgtggcttcatcaacagctccatagtacatgactgcacagtatgggagcctgtcaaaaagctcagaggcaaatcaagatcggtgagcgctgctagcgatagagcctgcaaaaaagtcgatggctaagctaagaaccacttggatgcagccgtaacagattcgagcgttacggtcctcttgtagcaatcgcagggagaccaagaagactgtggtcacaaaaaaagagccccggaggccattcctaattatggtaaaatcccgaatatatggtgtgcttatagtttagctttgacctacgctacgctagcacttcccacagtcatcgcagtaccccccaactgtacagccccgttgacaattataaggccactccctcctgtaccagcactctgccctacggacatcgcgctcccagctgcaatatttccgatccaactataaacggcagcggctgcagaacctatacttcgtaaagaagggtcattcgagcttcggggcgcgggaaacaggactcattttatttctcctacaaggttgcacatacccgcctggatgccgcctactgtgaatcctatactcgatataattagggctgttgcgaggccaggggcagcgagaacaacagtaccagtagtgccgacgaccgcgcaggtggctagaatagggttctaagcaccccagctggctgcctggcatatttaagcactagagattagatccttcccggtacatggaagttgtatatgaacctgagtcgccaagttggcggactttacaagggcaggcttgccgtaggttacgacaatttctccgcctttctaccccgcgtgcacaattctagcgcctccggagatgacatcccctggagaaacatttcggaaagtcatggctgaggtgggcaattactggactattcggggggacgaagctgtgatcgtaatcagggaaagatgaagttactggagttaccagaggtgcctgcctatgacgcaagggattcctctcgggcctacgtaaccccggtaaccccggaccaagtacagggattctaactactattcttagtagtaaaatacaacataagtaacagcaaagtagcgaggtgctgcgatgtacgtacttcggctatttgctggtaagtgcgaaaagaaattattagctttcgtcccccaatatcggaacttcaaatcctcgtgtaacaaccgtagtcatggaccgagtatatctaagacactcgctggccaatgcatagacgtcacttatccttaactcacgcgaaattgatggaattaccccgagacgcctctgaaaacctaccattggaacccctcaacatgcggagaaatcacctgcgcctcagtccgcttatgaacgaccccctcactcctttgctggccatgtacgacccgttgtctccttgttcgcgtggtcgtttcctaccatactcaaagataccagtcaccttatctgacggattgaaggggccgtgggagggtaagggactgggcgccataagctcggcgacgagtcggccggcgaaggtaagataaggcttgtatgggacttttctccgtcaaattgtaggccatttcatggggcttgttgtaaccctcggcttcctaagcctatttagtagctcgggggtgatttacgtctcgtaacaaaatatgtattcccagtctaatacgttggtcacgagaagaggaagcgaatcagctggggcacgatagatatatgaagaaacgaacaggccagaaacatacggtgtaaatttttggttttgacaaatggagcttgcgctcctgtagctgcgtaagagccaataagtgatagagaaaatacggatcttcggtccatttctttagggttgtctgagctagtcgctcctggcagatactcgctccaacggagtttataactcccattggtcctggataaggctcaaactgtctccttcgatctccgttgacgcttgtgtgatgtatatagcctactaaccagggggagctattatggatgtgatcgatggttactttatgacgataaaacacaatatagcctggttagttaacaggtcgaccttgaaaataaaatggcgctccttactgcttagtagggttgttagtaactcctatggaagctgtcctgtcagacagtagcttgtacctagagtaggaaaaatgacgctccttacttactaaaatgttgatgagacgacgacgctttataatagggaataggttcatagtaactagttcagtatcgtttgatgacttccggtaaggctttcgacgatcattgttcctgtggtcgttttgagtagattctgcacagatagggggagttccgatatcctcgaatctacaccccaccaaattaaggtggtaagaagtctactgcagaagattaatgagggaatcacggtagtagagcacgatatcacgaaacgattttggctgaggattggccgctataatatagataacaatcgcgatgatctttgcgatatcggcattattataataatgcctaatcaagatttccactgcctatcgggcacctctgcccttctttgatatatgaccgaccaatcaccttataatactgggagagttggacgcaaactgtaaaccagactatgctgctagttaggccagtaacgaccgcgaattaatacagtagttagtctagatagggaaatcactaatgtaactattttcatacttcaactatattaattatagctgtgtgttcctaacagaactcctaaaatagagaaataggtctgagaggttgtttaagttttaccactaatacatttgccatacaatcgctcatcttataaaatacctatatgtatacactactgtgaaatagaaagataattcttatcgctttatatgaggtatctacgttatccgcaggagaatgtcaagggtttaggcaatagctgagccgctaggcctctatagtcgccagtcacaagagaatgaacgtagctttacctcgagaacgaccatattattgagagctttggcttaggaatatctaatcggctccttatataggaggcgtcgcaactttataaatagttctccgtcagtaaatacaatttgtgatctcccaatctctagtagaagtccacttttagaaaagagttccagataattagatagaacggccaatctatagattctgcattaagctttctgcgagtaggaaagtccgatcagatcttaaaataaccatttttataccagtaaaactaccattggatgtgattctagacttgttgtaggactatcaaacaatgttcacggcaagattacagccgtctaatattaatactaggaatactatttactatttatcactgctataagggcaagtcatgaaataacacgactaccagctagcagggcacgaaaccattatcgacgaggtcactggctgggtgacattgaattgaagaaagctgggagtcatttgtggggactggcttggtactagatatacgaaataaatcgctttgcttatatattatttgtcagttaaaggatagaattacttagaaatcattcgggcaccgtaactgaatagttcctagccgaaggtagaatctgacctatactaggcctagatatgatagatcactctagacccatttaacggtagactggtttatgcgagttgtggatataaataataggctcgaggtatatacccacgctacccctatccctactcgggtctatatgactagtgttattattcagctcttataatcacttcgctatatgttaccctcaactccaatcaaacgtaaattcgcttcgcaaaacaggctgcacttgttctatatatctgtgtcagggaagtaggcatgatgtactcctaaagtgtaatgttaacagtatactatcatattatctcccttcgggtgttggctgtcgattctatctcgggcagtggcgtaaaaagctcctgcggcgctggctgaggctttatataggagctgccgtctggtacttgatcccgacttccagttatctcttatagtgatgactgtagtcgccgttggaaaaggacgaacgcaagtgcagatagtaccgctagtccggcgacgcttatgccgataccggtccctactttcgcgccagtcaagagtgcgctagtatcagatgatgcggtctccgaggttggagtacttgtcggggtagttgaggacattgggataaatgaggtcgctgaggtagatatggatatcgtcttattagatttcatgtagaaccccggggagtataaacgagggttagaaggagtaaagcttttcctagttggtttaaaagtgagcctatacttgttggtatctgatagcgcttccttattaatagcgactttctagacaaaagtccctgagtacgaaacatctattgtactagctattctgtaatattgtcagtctagtatcttatggtttttgtttagggatcatatactcgaaatctttttagactatatggagaaataggtgttctatacattcatctacagatcgctttactcgtgccgttcatatcacgattcaggatagaagaatcctaacagaccagtcaatggttaacgtagacccgatgtaataggtagtaacgaagtcttcattgtttccgctcggcgttctccaaatagttcgggttggcgcactttatgctacccgggatactgagatcatgagcagccatacctacgctatattggccatgaagtatagcagaaatgggagctcaccgttatcctataatgaataaaatgatgttgtttcaaacctaagaattcgagagagggaaagcggagggaccaggtcttggggaggtttattttaggagtcggaatagtaaacattcccctaagtcccaacccttacgaggtgcgagacaactagtcatttctatgtatggcctataaataatgctaagttaagtgtgcactagcaattagttgggaactagcaaccgaccaatatataataatgaatatgactacgaatgaccttttattttcctgtttaatctacggtttagatatgacgctattctcattcttatcttaagctcaggaactatgcgtattataggaccggtctttttgtgcgccaagaataaactgcatcccttaactgtcgggatctgccgtttaccgtattccgtcatattttcggccctcgaattgcgtccctcaagcttgcgagtcgtgtttttctgccaataggctccgtcctagctctactgagataaatccgtgtctccttgtgccaccgtttagacaaggtaaaagaaaaacttaactagcatttttggcgctaaatcattttccaaatcaagcagagcagctagtagcttctggctaagctctaatagcgtctagcacttgtaaagaagaaatggctgtgttatactctgggacgattaggactttatttcttactaagcttacttcgaaaatattaccgctatatcctctgttactgaccacagtgccaagtatctaactacattctatcacgagtaagtggtagtcgcttatcctattttctatcttactgcgcctgtaacctgtgatatctccttttcaccgtaattatttctagtaacagctacttttgcctttagatactcagtgagagagactagtaagagtataagggacgctgagttagtcaagaaacgttggctaactgttgaatccttcacggctctcttaattggggccctgagggagatattctatccacaatgacaggcctatatttcttgtctaggtcacctcgtctgtgagcgatttaacgttgaattatcgaaaagcgactacaattttatccctagaagtcgtggtctttttgcctagccccgctttagtgttatgttggttgcgttgagctgtgtgggtctgtctatctagactgtagaaagcgaggttacggtaggatatacaggtactcgacccgttaatctgttaaggcttagccatacatcgttaacacttatttaccgacagacctatagcttaacgcagctagcactaaagcgaggttaggaagacagtggccatgatttttactaatgaaatgttagacactctttggtcatttaacgttaggccgttagcagatgagatgtttaaatcataaaacctgggcgtgccattcttaatcaaatagctcccagtctacagtaagaccgcaagttaaatactatggaggattctataagccagccaaagtttcttaaccgatattcttaatacgaccctagctctttctaggtacgtatctaaaatggcattaagaaggttgccgccaatagttgtggtaaaaacgaagacaagtttcgataggcctctattagataggtatcattcgatgcttactaccaatcagagcacatacgtgacacgatgagccgggaagtctataaataagtcctttccttacagcaatttgctctataacttaatcactcggctgcacaaagtcgagcaggccttatacctgaaggcgcttgatgagttattcccgtttgaaccagcactggtttttccactctgctgacatttgtagaatatatctgggagtagcaagccggacagtatctgtgagatatagttcctagcagatctactggattaattcactattatacagatatgatttacactttagttgagtggaaatttctgacctaggttcggatttaaccgcaactctataccaccctcgcttaagcagataagtagatttcccctcagtaatcagtcaaatgtaggcctctttattaacaggtgcattatcgaatttttcgcctcgaaaattggctttgtcaataagcttcatttactgagtgacccttctgactattattctgttctatgcgaaaggttagctttttgaccgccttacctaggaatgttactgtcttcagtagccggcatgaatatagatggaatgaataccttagtgatacatacgaaacgatcaaacctaggagtatatgtaacctcaaaggctcgtataaaaaatgtctcatttatttcgccgcgataggagattgcaccgagcttcttcaaagcctattgggcctcggagctccatttagctatcgtgattagaataaacgaacgtgcaaaacgtgcaaaacgcgcaagtgtgctaaatcgattgagattcctctaagaatgagaatgaggttaccaagatcgacttatggccaagtaaaggccaggaatatctttattaagctttccactgttattatcggccttaaagctctagcagcacagatagttatacgcagtctttctagacctaaggctgccagaattcgcggtctaagaaagccttactccaaactatagataatggtctatatgagagaagatttgggatttgcatgtatagtgccttataggccataaaataggctctagtttactgtataatgggtaacctcttcattctcagcctctttatcctcagcgcctagactattactggctttttccctgctccagctcccttacggccttattatatatatggtatagggcctatgaataattgcgcagccttttaagtttatagataaggttttcccgattgtgtttaagcagtgataccagctccttggtctcacgaagtgaacagtagaaacgtgctcttccctaatgaagcgaagctataccaacttagtaaggatatttacgcttttgtatagtagacttacgatggtatccgtaaccgggaccgggcgtaagggcagtggatgatacgctgtctttattagtggttattatgcagatttcctttatggtatactaacagtcggaactcatatgggttttatatatcatggatgggactgcgcttggatatttatacctagaccgagtagctatagaatatcggggagtcgatatgcctctaagtctgctcctaggattgaagtcgtgcctcccaggacctagaattggccttgtcagggatatacgtaagcgtcctcgctgagatagaaattcctggattaatcaatcatgccaattacttagttttggattgttgtacgagtattatgtaactattttaaattacgtataagatctactgttcgatttacttatttcttcgtattggcacgggaggtgaacataattcggtctatctactacaataaggaagctgatcacggctcgaaataatactggtcacaatatatgattgcccacaaccattatcgaccgtatcttcgacctcaatgtatttacgatccgagcagggagcccatgttagggatagtgtaatttcgaaattggccaggccatttggaaatgggttcaaaatatcggtttcaatttcagatttgatctgcaaactttaccccaggttaagttagcttggcctaattggaccagttcggattccaattcaatgctagccaaaatttgtgaaattttcatacacttgaaatttcaccaaccatccctactggatgttgatatagcaaacaagccaaaaagacggatgcctgctcgtttgaagattggcgggacagagagcaaaccacccttagtaggcgcagaccttttattaagagcgaggggtcacatttgaatggtagtagcttcttcgacgcattagattatatctaacatcatcggtagcgcaaagctatcaaattgcgcgggttgctggctgcattaagcgtgctatcccgagtcaaagcagaccgaaagtaatctctttttagttctacaacctgccgggtcggttgtgtgagaacaaagccttcgggtggccattccgtgccaaactcattcttgagggcacttgagggaccacactgcgtggacgagtaacaaaatttcgttactcgtgagtcccatcgactgtactggatggatgtaacaactgcataattgaagccgcttatcgcctggagaatgtccggatcctcgatcttcacggctcgggccaacctaggggtatctgtcaaatttcaagacaccaagatcggccatcaaaagttgaccactctctccagagagccatttggcttgtcaactttgcagtcaaagctctgtgatattgctagagtcttcctctgcgcgagatggcaccgtcaacggcaggccgaccaagttggccagcggtggtatgaagcagccatccgcaactaggcgcaagtgccgcatggctctagagttgccgctccatccattgcgcatctgggccagcgtcagatgtcatcagtctccaggagtcgccctgcatcaggcaacaccgacaggtcacctcacgggctcagacaagatccaccggtgcggctgtcaaccaaccctgagccagtgcaaccattcaatccatttgtgacttccacaatgctgcggacaaacagtgttccatggcatgtttcgccggctcaaccagcgatcctgacatcggtcgctaacgtctgggctggcgtctaaagcttgacgctcaaggatctcaccctgagtgacgagttcgacgacatccactgtgtattttgtctggccgaggatgatgaccttgcaaatgagagtgtgatcttgcgctgtcagtgcaaggcgctttcccacctggcctgcgcggaagagtggctggaaaaacgaactacgggttttgggacgtcatgctgtgtgtggtaagtaggggggctggttccaggtatgcaatacccaagatgctgattaatacagtcgaaatgaagggcctttagacgctttgattcgcccaatacgagtccaatcgtcggatgctgagacacgtcatatccacacggcaactgaatcatctgccgatagagaacttgccactatcaggaattcatcaccaaatgacccgagtcagagccagccgcgtcagcggtcagtgggaccccaagtgggatcagttgagcagagcgtggagaatgggcccccgtcgctcggctaggctagtaggggcccatctaccaccaggcccttctacgtctgcaccgccccgccggtcagcacgactaaattccactcgaaggtgatcttagtttacagcgaaggtgtgacgggaatgagaaattagcgaagcgactgtttcacgcgtgaagacacgtgaccagacacaccgcattcggcccagcaacaaagagcatagccgtggtatggagttttataacaagtttagaaatgatacaaatgaagttctggatgttcaaactcgcagagcaccaaaactaaaaccgcgcgaccttttcatctttgcaagtactagatgccaatgcacccccaagaactgttggcagtttcgcttaattttgggatatttttttagaccgaaaccatattcatacccaacggtggtggccaaagaactgtagacatggtttatctcagtggtgcgtgtcgcgtcaagacggagactgttggcagaagataacacatctcgggccggcgaaggaacctggcaaactccgatgctggttatattgactctgggaatcaatatgttgaccctgggaaactcaaaagcatttctaggagctgtatatcccctgggaaatacaccttagctcctggggcttttaccaatctccaggaaaattaagatctacccctgggatctttgctctacgttcctgactgaatacacactggctctgggaacacattggttagatctgggacctgttgggctcctaggaccctacttctggatcctagagtcaatattttgctttttgaggtcgcggaacgctctcacaagacacccacaccagacctccgcacaaacctgagacattcgaccactcccagaaggcttagtcatagccccaggaaccgcacctgaggttccaggagtgggtgaagctgccaacaggaacatgactttaattcctcgaagtgggggtaaaaggccccagaagctacgtcgggcttcctggggtctatttgacccctaggagctgcttatatgctcccagaaaccgcactaaaggttccgggagcgagagaactcccagggccaagacatgcgttcccggggctgataaagctgccaacaggaacgtaactgattttgtgagtggggatggagagtgtacaagttacgcacgattttctggggccatatgattattgggctcacatgttccaaggtcaatttctgaagagtttacggcaatcaaggtagatggatgtttatgcagagcacatcgtcagccatcatctgtcttttacatcaagccactcagaatactgctccaatgttggccaatatcggccggctagtcaggtcaagcgacgaacatcctttgattccaattaggaaattcaacatctaagtcatctccgcaactcagaagtgtgtctattcctttccaacaccctatccgtcgcgcctctaatgtctatgggctccaccgtcattcttcgaaaatcatcatataatttagcaattgttcttgttcgtaatacctgctgaaccgttcttcataaccctactcctgtaggccgttggaaccttcacatttactgtgttgtaggctcggtgcgcgtactttgctagtgaccacgtaagtcgagtacgacacaacgcacaaacgacaaagtgaccagtaaatatcccggaagcggcctggccaatggatccataataaataagcttgtaatatgggatgtggtccctgtcaaggagctcaaaggatgcctgaaatacgtgaacgcggcaatccaagcccctaaggagagcacgatcatgctcacgacgatttaaatgcaaccgtagtaaaaccgagcggcgcatttctcttgtagccacttcggatagaccacgaggattaacccaaagatggaagatagggctgaaactagggccgcaatcactgtgccgtcgacgacgtcgtccatgagagtttggaatgtgatgtccaaaatagagtcgctcagtctcacgaggtcggatttgcacggtctcgcaggacgaccgccaagtgtacagtggacgaactgagactggcacgggccagccaggtgatggtaaggaaaaccatacgaggcgcattcgaatcatggcggtggcagtgctcgcaaggacgggtttattgagtgtaaagaattgaggcaggtgctgctcaagggaaaaaaaaaagtaaagagcgggaggtataaagatgaagaaggtcattatccccaggcactgtaaaacttatatgtgatcttcacgcaagtctgcctttccaaagaatgacccagctgatactgagctccgccacaggcgttttgattacctggtgccttagtggcagccaaaataggctttgactagataaaaaatgttccaagttgaagcactactcctatgcgtaaggcagatggcccccacagaagtgtctgatctctcagtacgggtcccgggaaatcacccgtttgttccttgtatttactttcctgatactatattattaacctccttaatatgtgtcgtgtttacgcgtgacatctttcaaatttgaacgtctgataccgacgtagtttgccttggtctgtttgcgatatatcactctgctgtactcgaggaaactgcggtttgctgttgattgcaagcctacccaatagtccccagaaagatgtagtcatctcttttctatcctcttttgttgagcttgtgcttaacagccagtgtaggatgcgcctctaagccatggcaaaccgtcgctgttaggtgaaccaacgcggccgattaggaaacgggcttcgagtgggaaacttaatcaagtcccaatattggcaaagaaacaatatggcttaggtggatatcttctacaggcggaaaactcacatgctcctggtgttcaacggtgttttatgttcaacgttgatgtgaacgttgattcaactttctgacatcattcaccacccgtatatcgcccaaggtgctggaatgagaacactcaaaaaatactatcaggtcggcacagtaccaacaaattatgacaaagaagttaaagtctccagagctcctggaagctcaaaacagaccctcggccggtcggatctttatcgtggcagcgcggcgcggctgaaccatcgccctctaacaacccccaagtcgtgagaaatgggactcccttccacacgccctatgagcaacaataatttggcagccatgttcctcctgggaatatgccctaaataaattggaggctcgagcatcatgtggatacagcaactggattaaaatatccttgattcgatcgtgcgtgtacgtaccactattgtggccatatattgacatccatagtcctcctaggagccggcgctgataataataacccgcaaaaccttgactgtgggtggtgggcatgactgcttcagccccaaatatttaaaaggttgtaattgtcctcacggttgatgatttcttgtctatcttttgctccaataagttgctagtacaacaccatcaccaacgaagccaattaatcatggatcacaacctatcacaggttccaaagaagtccaataccccagacacagaaggccataatggacgtatatgccaaactggtatagttattttagatccccttctcgaggaatccatcgactaatatacctatttcatgaaggcaatgaattggctgaaaacttccgtcgtgtcaatggtctatttatccacgggaatcgcagccatataagccaggttttacaaccgcctattggccaatctactggccctgtagctatagaggcagttacttccgttggtacctctcttagtagcttaagggcctctatgttatctctaagcgttataagggctaaaaactaagacctaccccttctgaacgtaaaaaagagagcagccgaatcctcaaccctcccacaaaagcgacgccgggattcgtactctacctctcaattaccgggccacctacaactggcgtatcaaaagagacccctatgccttataaaaattagtaggaaaatggtcaataatacacttcaatacctacaaatgctatccgaccgtatcttgatctacgataccatttcccctagggagtgggctactatgcatctcaccacccaattgctatagagcaggtacgaagagatcatcgtaaggaaagagatggaaacagacgctgtgcccgattttgatttaccactaacacagccagaagagaagtgccggaagtgtactgctgcagacgaggagcggctgtatgactgagacgcaccccgttatttttaccttatcggctatattttgatagtataaccggtcatttgaacttaaggagcaattatagtgttatataaccattaatcggtacttgagaacctgttgagctccaaatccatcagtatataactaagggacttttaggtacgaaggatttgaacggtttcctgtgcgatgttagtacgcttagtaagcagaaagaaatatgcaaaaccagctgtatcttgatctccaattaatacaatatattagagaaatcagatagcgcgtgcgaggccaatcggggatagcaatgaagaaatagcaattttgtaagttaaattgcctcgaatatcaaaatcagccacttcttatattattcaacccacttccttcgtaatagtgcaatggctccgtgccctacaagtatcgaaatatttgtgttattccgttaatcagctcttgactgctggtcctgataactcgacagtttggcagtcattttgagtctaaatgtcagcatattaatccaagtgactcaatatggcatcagttgtagactatattaaactgtagtattggtaagacaggtaattctagaacgccgaggcccaaatcagctgtgccagtattcgtccgagaattgtgagagagcgactcgccctactgaaaagcgagcttccaagccacaggcatacctagccataaataagtcgaccggattatctatcttcacctggccaacatggtcgttgcagcgtcaactagatgctggtcgcatggaagttgcgagtgatcattacatggccatgtaaatgaactctgtgcaacgcaataattactggcaagtttgccacttcatgggcctaccaattattgtaataaccataccatgtctgatccgatacgctcgttgactcaggagtgaaccatgaggccgccattacaaagaagctgccgcagactctgactcgcttgatagcttccgtctctttatttttggcgcgttggcggtcataggaaacctaaaatttgtccgtggacctcctgtatgaaccagcaacagacttgattatcaaagggcgcttttcttcctgctgctttgcagctgagtacccacatacccgattttgggcttgcctcgtacattctataagctgtatataccatgtcgagaggtgtcagcctgcatgctcactcaaattttgttatcgtggtatagttctgtgatttaacacgttgctggtgctgattgttggaaattgtgcggaaatgctgatatgatggggcctaatagcaacctatggcttaatacttactataactagcccgttccttatctataaaggatccctatacgatactctacgggtagtatgcccctaaacacggctagtaccctatacccggctagtacccgtccgaccacagacgcggagttgctcaaacccatggtttcggtttcgggaaagttggcggtgaagccagcgtgtgaacgactgcggtcccatggagtgtttctgtccaccgtggagtttctagttgggtcaattgatcaattgaccaccctcaaaatgacactggactgtggtgcaccagtcacttttgttcctgcgatcttgctatcttaggagccattttcatcattgcaaatgccaaggaggggtgtaccgtacgagcagagtgctgaagctgcctggataactcggttcaaattgacagaatatacagagtgataaataaaaacataaagcagggctagctactgctctggccaagaaagtggctgggaagtcagaagatatcatttggtaggaaaatgcggagggctggttaggtaaattatactttttattacgtgaaaggattatagtaataaacaggcagttaagtggtggcagggagagtggagtgtagatttgacgaaatgaatattctgcttagctgaggttcgaagtaaagattgtttgtagttactcgttaggcacaagatcacaattctctgaaataaataaactaaattgtgaggccagaccggttggctaaacttgaaatacgattagttgcatagaaatcaatcaactaggttgagtacccgggtcactgatgagcggctggcttagtgacttgaattcaagtcgtccatagtatcagggttacgtgataaaagaaaatatcaatgactcttgaaatcatcgacataatatctcggttgttagaaattttttctcatatgccatgcaaaatctggtagatcactttcttgaattgcaggcttaaacgcgacgacattttctttttgagacgattgaatacttgaccgcaggaatcgcgttcggtatatatattaccctgcctcttttcggaaaacgattaacccataattgaagagagcaaaccaaaatccattgcagatcgttgcccggcagatgtttagttcgacctgaatccacatttcctggcaagatttctcatgcataaggcgaggaggaaatcaataaccagcgccgatatgctggagagaaggtgtattaaacgagtctacagcataagccacaagagaaggatgaattactgagtctgaaacatatgtttagcggcatatgatagccgtcatcgtaacggacaatcaaatcaactactggaacgaccaatgtgacggcactgatttcccaaaaaacttgacttcgtgcagtgaaatttatattcgacagttagcaatggtgttgtgggattcgcaaggatgacatgatgggcatggggtgctcgagggttgtggagagagtcagttgggcggcaaacatcggtaccgatacatccgaaatagctgggaagaatgtgttttgtcaacctgaggattcggtgtatttactagcaatcgggtttctcttcaccgacaacgtacatcggaaattggctagtgttcggatttgaccaccatattacaccaaggcaggatctaaagctttcatggcagtaacagaatttttggaaagtttaaaacaggcgtggtgttcaacgggcccgaaaggggccgtatgaaatgccaagcacgtaatcagatcgtgcgatacttaaactcaaagaagcagaccaccaatgtataattatctgaggagaaagcacaatcgattgtaatatatttatcatattcttcggcccgttcattaaaattatacacaatcttcagatattgagttgcttctcttaatgaagtcctatggtagtagaactctagcggtaagagatgccgtaacccgcaatgtcaccaaagtggccaatggtgggtacacaatcacttgtctcgctttcgccgagcagctcctcgtgtaagggatccaattcagcccacgcgttggcatatttcatccccttgagcctttccttctcgatgacttgaccgatctcaatggccccattctcatttatattgttcatggtagcttcaacgcttctcggtcgaaggccctgatgttgggcgggaaggtatcccatctttctactttcgccaagtagacccgaagctctcagaagtcgttccggcgcgacggtcaatcttccctttttgaatacatatttggagaccgaagttgcaaaaataacgggtcgcgctggcttgtccctgctattctcactttcagccctggcgcaccctccagaaatgcttccggtagacaacgtatgagtgacaagatcaatttgtttgacgcttcctttctggacaaagtgtgtcacaatatagagccacttttggtcccatgtaaggatccgagaccatacttcgtactgctggaagattcgtatttccatcttgaagcttgtggtaacagatccgattatggcagccattatcccccgcctgccaccagcgacgagctcttggtcgacaagagaaactccacgacagcaaaggtatgacagaagatgagagcggcttgcatcaagatccgtaaaatatgtactattcgacttgtggaggttgtagtcggcttcaagaagtggtgtgtatgttgtcgttacacagggaagaaagactagcggcaagtttttgtctttgcaacgaattgatacgtgatggcttctcttctttgttaagaagttctggatgatggggcgaaagatgcgatactttaggaaggtcagttcagtcagaatttgtaggggcctggagagggaagactaaagattatgagcttgtcattagcctttcagtgaacacttacgtgaaatactagtggtaaagttttaagattgaccacaaggaagattgccaggaggaacttccaaagaccgaaggactgaatcgaactccaaagccattcaatcatcttggcgaatgtcatcagttctaaacgcatcgagcgaatttgtgatatttgagcagatctgagcagaaattggctttaagaggcaatgcaacgcagtcactgtgaatgtgttgtatgtgcactgtgctattgagaatcgattggaaagaagagaaaaagaaaaactccctcgtggaggtgacttatgattttatgatcgcataaaacgaatcatatatcgaatatgcgggttcatacggccgggaagccgaggcaaactcggcagtgatattgtcatcagttaattcttactgctaggattaagattaaggaattttgcccaattctcgaacgcattctcattggggcttgttagtaatacccgccacccagaaattggaacaccataattcttgaatacccatgtctttttggatatactgaaggatctgcggcagggcttgcaggctggtattgacaagatgcgtttcttctctttggacctgttcatgggtcgcatactggtttaaatcttggcgcagttccctttccactgttgcagaagcatgaggttgcggataggatactgacagaaatcaggtgtatggcgaacgtattggtaaattcacgatggtaaaattctctaactaactaaaaacaacaatggtccgtttttgacagtctggtcggacacaattagtaagcaatttgcatagtctaaaatcacatgattccatggtattggactcggtaatccatgtactcggtctgttttctgacagatactactgataacgcgtctaataattcaccgctggtagagagcctcaagggatctattcaggggcttgagctatcaagcaatatacctattttctggctccaactatttcagtatattaagctctacttttgtccgtcatcctttgcgacatagagtcgatgagcctgtcgacgtccatggtcttcagcgcttctgctaatgggaagcgggcgtatgatccgacattgttcctacggttctgggctcttgacagagcactccaaatgggatggtcgcgaggtagagtgtgcagtctcgcaatcgtgcgctgcgctcggtggcgaaggcgaaggtgcgtggggagtatataggcttcaacctctagggtcgcggttgctaccgtcctgaacgccgacaggattctgatcagcacgtttctctgaactgtgttcaagtgtcggatgtgaactttgtctctaagcgggtcatgctagaccgtcgatgcgtagtcaactataggcgcgacacatgcttggtagagctgtcgcatctgctctgggcgcaagtgtcgtagtccacttaaggcgattgtggtcttggtggcgcgcttgatagcctgctggacatgttccttccagcgaagtccctggtcgaacaccacccctagtgatttggctgtaggcgatggcttgacctcggtcccatcgaagatgattcgtccttccatatgctctcccctctttctggtgaggtggataagctcggttttctccgccgcgaagcaggatccagttctccgtgcccacttttcgatacgagggacatcctcggactgtatcttggttaaattttcttgaaccgagccccccactctccatcggaagtagtcgtcaatgaatgccgatgcacctccctgggagtcgacgggctggtcgaccaggtcggcgttaaagaatgcaaacaagatgggggaaagtggtgatccttgagctagcccagcattcaacagcagagcagtctcggtgcggaagtcgtcaaacccaatgctggcgtgccggtcgctcatgaagcttgcaatccattttctggccacaattgggatccgtcttgcctgcagcgacgcatccaggcttgtcttatttactccgttgaaggcgcctttaaggtcgaaggcaattagggtcaccaccttgtgcttgtaccaggctttgtcaatcgcactggacagcactagcagggcttgctcggtggtcctacccggccgtccgccgaactggctgtttggtagcaggccgtgtttttccgccagataggacaaccgtcgggccaacactgcctctaggagcttgccaagcgtgttaaggagtgagattgggcggtaggcaccaggttttgagtaatcaggcttgcctggttttcgtaggacgattatttttgcactcctccactgtctcggatggtgccctagctctacactcgctgtgaagatgctaacaataaaggccttgagatgcctccaaagcttcttccaaaccagcatcggtaaggtatcttccccgggcgctgtattccctttggctgctttcagtgatcgctcaatctctgattctgtgattgggtgccacgggagttccgtcgccggtgtggtaggtgggttgaactcgggtggactcatggcggggaagaacgcatccaggaatgccttcgctttctcttcgttttggatgcactcctccgagcccactcgcagtgctgggacgcaatcccatgtctctcggggcttcatgtacgtcgcagccttccagagcttcccttcaccagcttcgtcctggaattgcttccagtgtgaggacttggctttttcgatggtcctcgtccacgctcgtcgtttctgctgcatagcttcgaaggcagtcgtggtgttagcgtgctctcttcccagctcggcgcagtttgcctgccacctcctacgcagttggttgacttcgacttgttgggtcttaagatctggcgtgaaccatcgcttggagtatggcgtcgggcgtgtgtcgggtgtgaaccggtcgaccgcctgggccgtcaccgctgtaaggttttccactacccggtcgagtgttggccgggtcttgatctgcttccatgggttcatctgtcggactacttcctcgccgatcctagtccagtccgcgcgctcatacgccttccttgctttggtgtttggcctgctccggagttgaaggttccattctggataggtggcacggtggtcggatccatagttttcgtgatacagatagcatttgatgagcaagtccgggttatctgtcaccgtctggtcaatggtcgagttctgtctagagttgttgaatgcccagtaagtcgccgtccctcgagggagacaactgtggaggttgtgggcttggaagaaatcgatcaggtcgctggcgtcttcaatgaatctaggagcgatatagttgttgccccacattggatggtgtcggttgaaatcaccagaaacaataatactcgtcgcgcgctgctcattttgtgtggcgcttgtgatagagttttgtatcgccgtgagggctggtaatgctgacgagtcgttgcccttgaaaagtggtactggaggtatgtagaccgaaattaccagcgttgggagtcggctgtccagatcttaacggccgcgacatctgggtggtcgtatggtagttggcgatgtgatgaggtagaaattcttcgattgacatagagtaagctgcgaaatcgaacggcgtcagtctgggttgtaggtcgggataaatgccaggcgctgtggttgatatgcgttcggtaggtggtaatagatggttcctggatcagcagaacgtccaactctcggctctggggatcgttgatcagcgcctccatcctcggtcccgatttcatcatgttcaactgtaggatgcggaggtacttctctagcatctggtagggttggaggtcgatggtattgggcactctcgatcgcccgtagggtgttcaccactgcaatccagacaccgggctctcactccaggcgggcatcgctcccgctcgtgttgtcctgcacagtgtccgcatcgtggtgtttccttgtatgaccacgctagataaccgaaacgttggtaccggaagcacctctttttcttgatctcacggtgttccacgctaccgatatatctttgtctaataaggagactattgttaaggatgtattccgctccttctgcagagtcaaaccagataccaagcgacgcgaacttccctagaactttatctttccgcttaagccatactaactcttcgatttggaagccttgttcggctaggtcgttttcttctataattatttgaatggcttgagagttcgcattctctaggtcgaagtttttagtcggagtacggtgcactacgacaccgaatcgcggcttaaccagctttatattgtttcctagctcattcagccattcagtgttattgcgggctgcttcggccgaccctaggtccttgaagcgaactaagtatccagttttagtagtaccaatgccggcaacttgtgcatcttatattagaggtgcgcttaacagcgctgaacggatataggtgttagccgagtcggtagagaggtatcacccgaaactgttccctcctctactctcattatctctcggatctaccgataatctctgtgtgctaatgcggacgcagttccagtccttttcgggtcgttagaggcttggttgcgggtcactggtaccgctggctgctatcgctgcccaagttctgggcgggtttggttgtgggctggtttcgatttgtgctcttagagccctaacttcttcatggagcctgtcgttctgctctcggaggacgttctagtcgtgcttgacctcttctaggtcggctttggtggattcgatgagcgtggtttggcgatggatgatatccttgaggttatcgatgagcttccacacctctctggtggtaatccggcctgtgccctcggcgggtgtataggcttcgccatttctcgttcttttccctatgatttggcctgcgtcgatcgatactcgaggttggaagtcttcaactgagaagctggcctgggtttcttgggtgtttgtgggagggggctcgggccctcccgctggtgggtccgccatcgttccggggttagctcccgctcggtacacaaccacaacagttttatatcggaaatgcgtccttatatacaggatcactcctattgttgctctatgcccccgatcgataccgtacggttacaggatcgactttctacaggatggatcgaaatcagtttcaccactttgctctcatagaatctttctcgaaccctatgacgaaacacgctaattcatttccgatttagcgtagtttcaaatattgaatcgtattgaaaggcgttatcacgtgttatattgttgactcatttgttcgtaagagtattacgaacaaatgagtcaacaatataacacgtgacctgttgctgtcttcgggtctgccatccacatgaaaaggaaaaggatcacccatatgcaattgtaccttttactaggtggaccatacaaaaggttcatatataaatgctgatttttcagtactacaaaagtctctaaaaacttattataacctatcatatataacaatctactctatttaaatactatattcaagttccagcctaggttttagggagcccactacgagcccacttaaagtattacactttgaaattttgacctactatcgcgcttaacataagatattcgactactaaggcgtccgggaaacttacccttacaatttagtaatagaatattagtgctgcacttacaataaaatgatattatataattaagtcgaaaaaaaacgagtatttatatatgtaccttttgtgtggtccgcctagtaaaaggtacagttgcatatgtatgggtggtccttttcccttttttcatatggatggcagaccctccgtgaggaaggtctgtaatttctgtaaaaaaaaatgtaagggccggttagtaccgagagcggttaaggctgagagattagggttgagtaaatcttcgagctaccaaaaccaggttgcaatgtaagattgaatgacttaaaatacattaaaggtaattccataatgcataaatacagtagatggaataatccaaatcaaatatctacatatgtacatccctaacggcctcggaggttcggccgatatcgcctccttcctcttttgggccttggctttttggtcattttctttgtgaggctccaacccataatggccgaacgctcaacccataagcaaggcaagacacttcagaattacgaataaaatgggcggggtaagcggatactggccaatagcgtaccctatatccgccacatagacagttgccaagttgaaactgagctaagaatgggatcgcatgggaacgggcgctcagggcgctcggggcgttcgtttaaggggctatgctcagccccgcccgggaaataaaaaagtaaagtgtttttgctatgaaatattccacatatcttttcttttgtttcccatttttcttccctggaatctcaagatggagacggcggatggtgaggtccctctacggcaacttccgagaagctcaaacaatcttcacgcacctgaatactccagacacgattcctcagccgagtctgacccgcgacatgatgaggagcttccatcatatacccaggtgcggtcaacaggacaaattctaggacgagggcacagtactttgcttcatcgatcggcttgggtatttgcattcacgatcatttacgtcgtactcgtcgtctacgcctgggccatgactgctgtactgtcaacccgacccttcaaagacaaatcctgggcgtactcgtttggaacctcccgctccagttattactatcgttataatgaagcagacttcgatcaagagagaaatatctatcgttctgtgcggactatccataccttcattcaacttgtcactcttccctggatttccacagtctgtgctagtgccgctgtaatctatgcgcagaaccaaaaggatcctatgggccttcggctacgccaagtcacaacgctggctgaccgcaggtggatggacttttctttctatccagccctgatttataaatggaggcaatacggtagcaagctactggccactgcgatcttcatctgtgtgtttggtctcatcacatttcccatccagtcggtctttctcagttcacagtctgtcaaagtccggactttgccccaggagattgccactatctatgacttcagcccgaatagtggttattcatcttcatcatacgataccggcaaagacgtgctgaaagtccgcaatgccctcaacaaagcgaatgtcgatttctaccaacctaacttgtggagtaacaacagtggagtacaattcttgactctcaacgatctgtcttctcagacgtactactcccaggttccgagtggtttcaacacaggattacttcgtcagtttgctccacgtgtgaactccacagctacatatgagatcgtaagagcgtctgatttcccggtcgactgcagttcacgcccaggggcattttatgccgagtattcatcttcatacccgcagtacgttaattctacttcaagttattcttggggtgtcactgcatgcatgccaggaaatatgacgagatctccttggcagctggcacgtaaggcacgtaaccggcaggatttctctgaggttctctatctcaacatgacacaagaagattacagaacaagagatcatcaaactctttttcagatcactgtcaacaccacggctggcttctttgaattacccaactatatgaacaagggtgtacccggccccttactggatcaagatccagcggaactttgtgatcagcactgtccatcccaattcaacacatactattcggggtaccgccgtgacgggatcacagtggaaggcgctctcaaagccggatcgcttggtcccatctcaacagacaacaaaggaccgttgttatcggccgcgctggcaagcttcggccctggctctttcatcgactcattcattgcaaccgccgcaaccgttaaagcagacgacaaagttacagacgaggtgtcatcaagcctgggaaaagtatgcgctgcgaacaccccactcaccaacctcatggggtcttcctctctggagtgcgtatctgttgtgatcgatagttatggcgactattattaccctgttgggtcatacattgcgcaatggataaattacttccaagacaacgcggagccagttcagaaggccttcacatcagcggctttccttgccaatcaggaattcctttccagtcagaggggcagattttctgttgcccaagatttgggcgccgatatggatcttccatcaatttctcccgtgggaattatcgtagtctccatcttgatggcactttacttgctacctctgttggcgttgtcactctacgcgggtttttcctatcgatggaccgaaagattggattcctttgtgatgctgcgatttggagcctttgttggtgataagttctttcctttgctcattggtcgcgagagtgataaagttcctgagctggacgagatgcctggtgttattcgggatgtggcaacatactcaggcgacgaggttattaagattgggaggttggggttcggcgaaggcagcaggttgcgagaaggccatcggtacgagtgcttccaaggaaacgacgagccattgaatcattacgaatctcgacggatgcaacgggttattcaccgccgagcctaacaattgatatacgtatatgtactgggctagaaggaaccctcggtcatttctaatgatttgatttgatctaataataatgttcatatacgcaaataatctcgatgcttccaaggctatttcatgactcattagaccttatagtaggtacttatataactagtagccccttcacccttcaccgggatttcccccataaagcgcctgatttttcaaaatactaggatttattttatgaccagcctggcagcttggacaaactttattctggaaatgttcctcgttatgggtatagtattcgcatctttatcacgaattatgagatttatattgttccccgaggtctggatattattaaaatacaggaaggaattgggaaggagtcatcggaatctatcatatagttggtcctgggtaaccgagctgctgagggaggttcgagtaaatatgtacagtgtaagagtgtacggagtatcctgtgacactgtggctttttcatagacaaatttggaataattggtaatgtagttgacagtaacatatgttttaattctcaggaccctcacgcatctaatgtatctgttgatgtgggaatttgtcactgcatacctagctataggcgcgatcgaggttcagggatctaccaattccataaagactacgtaataaagaggactagataatatttgctagacatgggtaaagacagtgagatgtgtaaagaaaaacagacatggcaagagtcaggtcttctttgttttcctcggctctccaagttccacgctttctcaccctatgtataccatcacgccgcaatctattttgggcactcacttcagtggatacaggggttcgagacaaatggagttagctgatgtctttcgtggcttcaacgtgacccaagtgaagactctgaacctttggagttgaatccataagtctttgtttgacaaagccagcattaaagcccatttccatccggtacagcggaggagggttgtttgcccagacagagccccaacaagcatcacaagtcgtgtcaaagatcaaaggaataagccaaaagcgtattgaaggaatcctcgaagtcagatccactgagagtacgcctttgcaagaactcgccgaatgaggcgtttcaagagctatgttgaatgaacagcatgaaaaggagattagaccttcatccaagagaatgctctgtcatctttgtttcatcttgtctacggccttcaagctttcttcgacctcccataatcgaggcttccgtccggtgagatgggttcggcgtatacaaaatgctaaggatacaaataccttcgaggttctctcctttatatttatcattcatacattctcaatatttgatttgctagttacctagagaaagaaccaccttgctcgtgactatcttctctgttgcaagatgcctccacggccttttttccctcgcgccgcaaaacctggcagtaaagatgcatccaagaagaccgatggaaaacgcaaggcagatagcttgacgacccgggattttaacctggtccgcgatgtcccggaaactttgctcaaattgggctttattacttgtatggacctagaaaacctatgttgccggtgatttggatcggacttggtaggggtattcgatcataagttgtgcttccttcgagttgtcagcaatagaccacgtaagaaccgcaatacccttacctaataccgctgaggctaattagcgctatcctcgaccctgcgactgagttcttactatagatctgatcaagcagtgtctcgcgatagataaaatctggatcgcctgtgaatggcatagttgataaagggctgggcggagtttctggctgctctagagggaagcggcaattagtcagtcggtcttgaccttgtttggttccgttcctgacttacccggtggcaggtgaaaaagtgccgtaaatgtgccataattgattcccacctgggctctatagttgataccagagtgacttgtcgaacctatggccgtataaatttgcctgtctgtagttcattacaagctcttctctggctctcaactgcaggaggggtacgtcatcaggtgactcggctccgcggcgctaagacaggagaccagatttgcaggccacccacgtcgaaccgtggggcaggactagcaccttcccaggaaccggatcgacccgagccagaacactacagctcaagcgcagcacgcgataatcagaccggtacatacccgcggggtgaaaagcatgctttgacagtatgacgtcgagagcttattgctgccggctttatcaagtacacgatggatactttgagatcgcattttgttgttgctatggtgaaactaacgtatggttttccagccaagcaaccacttttttgaggtccgcagcttgagatgggcccccgagctcccaggaactgcgagatcgcccatgtcacgtgcgtttcccaagagccagcatcccccagacttttcacccaaattcattttacccgctcactgagcagaggtggtgcaagggtgagcagatggagttccctatcccccctccggcggtcgaccactgagtctgccaaagctctcctatatcaacgtccagacttttcttcgcaatatggcgccaagactccctctctcaaagctcgaaatgacccagcacatgatattgagcaaatcattgagtgcctcgcaaatgactaaagctgctgaatatagtaagcgttccatcatcaacatcagcaacaacctccgccagtttggaaatgtcggagcacccgcaactcgagtcggtcgacgacgaagcataactcctccgatgatagaagcactgtgtgatcgcctcctcgaaaagcccgggctatatgtggacgagaggacaatctttttatgggacgagttccgtgtccaggtcacaaattcgagcctcaaacgggctctcgcttcggtgggctggtcgaagaatgtgactcgacagagagcaaaggaacaaaatgcggatctacgagacttttatatacacaacctgtcggactttcagtcgcatcacttggtctatttggatgagtctggatgcgataaacggattgggttcagacggacaggttggtctcctttaggtacggcaccattacaggtagccaacttccatcgggaccagtggtaccagatattgcgtgcatattgccaagatggaatagtgctctctcgtatatttcagggctccacggattccgcagtcttcgaggacttcattggtcagcttcttaggcattgcggaagatggcctgagccaaagtccgtcctagtcatagacaatgcatctttccatcattctgatcgtatcgaggaactgtgtactaaagcaggagtaaagctagtatatcttgatggcggcaacgagaacagggacagagaaagactgtattcgctatctgacagatgactgggggaggaagaaggaagagaggaagacagacagagagagagctggagacaaacaaacagacaggcatgactagcctgaacaaacaggcagccagccaggtcacatgacccaggctccaacactatagctcctgtcagggatatacatgaagtatataggacggatggagttatgggctatgcgagacccacatggcgtatgtgggttcccctgaacgcgaggaagctaccttttttgcttcctcacgctacgtcttgtatctagagtcgactatatctttctttaattagtcattactcatctgaacaccttgtcttacacatggatggatctaatataaacaatctaaaaggcaaggttatatgaaccaaccagcagagaacccaattaaatatgcactagtaataaaggaaatcaaccatatatctgcctgcagagcacatgtccagcgcaactacctaatgctcatatattacttggctaccgaacattttgcatcacatgctctaacaggcccttgtaacaaaaaaaaaagatattatacaggggctagttaactactactcactgggatcgctagtttgccttgctagttaggcgcaataatgtaacttttttccaatcgcttgacatgtgtagacatcccttggaactgcatagactcaccacacacccaaattcgatgggcctctataatctatatcatttgctacagctacatgttatatgaggaatgctagacctcgctgtatatcagtgcgtaattttcggatgagttgcacatcgtatattagttatatcagggtaacttaacaagatgatgtagcaagaacatcatgcgtgaatgaacattcgccattgtggaaccatcgaatatagaaagcatcagagcaaagctgcgactgctgcagcaaccacgggagcagctgtgatcaatgaaccggcaggtccagcggctgcagctccaggtgtttcggtcgccgcgggggccgtaaacgacttcactcccccagtgacgtccatcttgtagtagctgctggctgccgtcgaagaagtcgccgaagatgaggacgaagaggcggtactacctcctcttacggttccacccatgctagcgctcatggtgcagctggcagattcggaccaggatttgaaagagcagtcatacgtttcggtaacggtaacatcgtaaccgtctgtgcctggattggtggcgacgtattgtgcagcgaagttcacggtctcgggaccttgggtaatcgtccacgaagtgacaatgtcgcagtctgatttggcgacgtcatccatacaaccgacatggtatgtggtggcttcggcattgataccagcaacgctggcagcatagctagtcacgccggggaggtcattgtcccacgtgggggagaagattccaatggtggtgcgggtgctagattccttggctcgagcacccagtgatgcgaggaacgcagcggcaaagatagaggtacgcatactgatagggtttttcaaatatttagggtgaagtttagcagagaggcgagtcgactaaaagttctaacatccggggcaaaccgttcgctttaaataaagacaaaccaagctactgtgaaacttcgcttatcgagcaattttggacgactgagctatgttagcgtagacctagagggtactagtgaagtgtgctagtctgggctattttcatcattcacccattggaccctgaaacgttggactggacgagaataggactggcgttcgactaccttgctagcgttacaaccgagtagcaaagcacttcaattttgggggacggaccccgctgaataatacatcacgggggccctgttacgatgtataattaccgtgtagaattccgaaaggattagataaatgcgaatacaaatacaggaacaattttattcgcgcgaattgttgagatgaaatgattgtattgggtggagttgactcattttctaggtgggactcattcattacatatctcttggtagtagtccccgccataagctctagcgggtctgaattagtcatcgcacagtgaaagaagatcatttggatccgattgtgggccaatgaaggtcgggtattgggtctaaaaaggcttacgtagtctgagtgctcactgggcactccgggcacagaaggaaattattttgcctttgtggtaagggagagtggcagcggggatgtccgtaagattaagccaaggaacggtggagcgctagtgggcaaatatgggtgtcgtgggttttcgtgtgagacataacgcgggtatccccgattttcaccttttccaatctttttgttaattcttttcttattttcccttgcttttccacaaatctttggactcgattttgcctcgggtgacctttggccttggaaactgtgccaaggataagccctggcccctgaaaagtcacctgtttatataatttgaagtgctcttcttttctatctccgttttcatttccatttccccatcttgaatattctaaatactcaaatatgtacacattcaataataggctgtacctggggtcccttttggccttgcaggcctgcaccaaggtcataggcgcctcagctacatcgggtgtcctcgaagtcgacttggtcttcccacgcaatgagacatatgcgccctctgcacaaatgcccgttgtgtttgcaattcagaacccgcatctggttgcgccgcttaacatgaaggtttcttacatcataacgcctccccgcaattacagtaacatcagcgagccagccctattcaatatgaactcgaccagtctcttcagcagcgatccttacttcctctataacaacactgactttgtcaacctcgagggcacgtgggaactcacatggttcgtggaatacggacgttgcaccgggtccagcggggatattatgttttaccccagcaattccacgattgatagtatcatcttcaccaccaagagtggtgccgcgaagccggacctcattgctgctggcaagaaagatacttgcgctacaggtattgcagcctggaatgttaccggggcaatggatgtggaaggcgccgattggggcggctatgacacctgcgcggtcgtttcgaagagatcaccatgggctactgtggacccttgcgcagccaagttcgactctgctattgcttcgaatatctcggctgccttgaatgccactgcgggtgacaaagtctctgcagatgagaaaaattctaaagatgagaatgattctaaagagaaagatcctgcagctgataatgcgggcgctgtgcatctgccggggggtggtgtgacattgttgacagcaattttcgctgggctcacttacatctttgcataatcgtctcttttcattgattcgacattcaattctctgatcacacatgtatatattgtatttggttagagatcttggccaaaggaggcatttgtatcacagtttgaataaataaattctattcgcagtcacaggcaactacagcgtaagaacaaaaaagtaaataaatgagcgcattgtcgtttccatggcttggggcgcagctagttgggcattacgagatattcacttgcacgcgagacatagagccgcaaaacacagggaccccggaaggttgtttagtgaagaccaagcactcaaggtccggggctggtaggcctcggcttcgcggcgcgaccattcacggtggcgctcgaacgcctggacctccacttcgaggcgcgcttcaatggtccgctgcctcaccgtcccgttgaggtggggctccaccaaggggtggatatccgccgtaatgggtttggcgtacttgaatagacaatcgggacgctgaaggtcgcccgacactacatcccagacctgccttgctttgagataggaggtcatgagacgtttccaggttgcgaagttgtcgcttcctgtcagaggctcgatggccgtgactgctcggtcaggcgagtcatggaccagagcagacatagtgaggatagagaaagcggggtagatatataatcaagatcaagattgacaagatgattctcagatgagtagagacggcacccgagattttgctcccgggctcataacctgttgttgttcagaggtatgaattgattgtttattctagagggagagatgaggttatatatacaacacggagccaagttgattgtaaatcaacttggttgtctgtatagacatttcggagctaattccgatggtgcggcttgcttcctgatctgcaccagcctcatatcacaacagaaaccttgggtcaaaggcaacttcgataattctaaactggaagataaatgctcaaaatggaggaagaaatttccgtacaatcacagggtgtcttgagggctctttcacggttcgtgaatgtattccactgtcatctaggaagtgttacagcgtcactaggcttatagattgctaggtgtcaaaaatctggcgaattcaaagatccgacccttgtctgcgagggagaaaggatcaacgtatataaagttgtggtttgctctcaatcgggcgtacttcatgttgcctgtactggcaactccaaggttagtaatttactatagcactaccaatgaggagctaagattcgtctaggaggcgtcatccggcgtctatgagtttttggacgactcaaaaattattgttgggaagccagtaagcttcttttacatcccaaaatgcataaaatatcccaggtcacgggctcccaattgtttgacctgtttgtcaaaccgcgggtgacccgcgcttaaccacatgcggtttctggcagcggcataaccaaccgcagttaggagaatccctaccctcaaccgcggttgctgccgagctctaacgacaagagcaaaggacggggagctgtcacgcaaaaggaaaaagacagctttgcgcctgaaggctgtagtgccagattcgacctaacttctcctgattccccagcgactatcgactcttctgcttgtcacagggactaattaccattaaaaaattgttggccgcggcgcatcttgcttgactcaatttcagattccaaaattacaacgagtaaggaaattaggtttccggagcatctaccgccgggcaatctccgttacgacgcactcaatcacagattacatagagcagagaaatatactccgcccatagggatctacggttgaatgattttgataatgcaacgcactattcgctacctgatgccgttccagcataatgcggcacctgacaggccgtgacagatcagttgttttcagccgaggaagtaccgccgctggcttggggttccgggctttcaatggctattccccttatcctcagatggcctcttagttttaccccgaagactgggggctcccaagcacgcatgcaaactgaagttgagaagatgtttttgccgctgtgcttagtgatatagatatgaagaataagagtttttattatttgtcaggaatgtctgccttaactcgtacagttctgccggtcatttattaactatataccttcggtaacaaattctgcccagagtagactatattgtcttcatactgcttttttcccacgtcgtgaggcacacctacaggccttgctcaatcaacccatcttcataaagttgcagtatcatacgtattgcctcctaatactcatgtgaagataattgaagtgttcaggtgatgacgacaacagtcggctttggtcagattattgacgaattggatactaatgtaaatacagtgaaaagggaataaagagtgctgcgaaacttgactcgttggaagccaacctggtgctagtaatcggaaatttgtgtcgctcgatgcgaaattccagcttgctcgctgcatcagagcgatgagttgccagtgggttttccagcctgagggatgaaatgactgctgccagctacgttctcacggcgatggttatccggatctgattcaaccctctggtcaggcttatccgctgcacggttgcggattcctgtaggctttccagcctgaggcatgaaaggggtgctggcagcgacattctcgcgatgactgttatcctgatctgaactcactctggggtccagcatgttggcaattccattattgtgaagaccacctttgccataattgtgtgcatatcctagatgagcatctgggacgttctggcttcctgataatttagttagatctgataagtgtatacaataactgaaagaagcaaagaggtgaactgtaccgctgttgactcgagggtcgagtttattagcaagcttggagcggtaaggtccgccgttgctcgactgatccgacataatgaagtgtggtgtcccgcagtggttatcagcactggattaagtaactttgctcctcccctgagcggcattatatttgtcttcattggccgattacgtaggggtgacatcagcaaactcacagaaaaaccatcgggtcgccagcttagtcatgcaaaactaaatccaccaaattcgtagattattggcccctatcgggttttgctagctcaggaataatttttccattgtatttctactgttggaccatacttcagactgattcggccatagccccaggaaccgcacttgaggttccaggagttgatgaagctccaccaataaggttgagtgacgtcattgctctggctcggtccccaagaacgagttaagcacctcttctttctgttgcccacacttattgcccgtatttcaatttgtattcgtaatattgattacacattccagagcccacattttaggtcgtgagacccctcacgttcctgggatcatatccgaccccaggaccatggcatggctcccaggtacgtggaagctttattagagttcctcaaaagctttatggtccggggatggatgtgacggtctcacgtatacatagaggtggatagtgtttcaagatgaataatcaatgttaagaacaactatagttgactctagatacaagacgtagcgcgaggaagcaaaagaaaggtagcttcctcgcgttcagggccatatacaccatgtgggtcccgcgtagatcatatctctatccgttccgtatgcttcatgtatatccctgacagcaatcaatagcgtgcctgggagcatgaaatctgggatcagttattatctggcgctgatttagacctccctgaattttagatcaagtgcccaatagcggagcagagtggggccgagatgaccaaagtcgtcatagtagatatattccaggaaacctgctgctctcagaccgcgtctgcggatttgtggtaagtacctgatcgtcagattgggtggctgagctgagatctgcggggttcatgaatgtaacttgacgtttactgtttgcattctaaccacgctatcacactacctgaaatttcgtggtaatggcactgcacctcggcacaccacatgatatctgcagtccaagggtcatgaaattcaattttcatagcaaaatcgccattattgctatatagcgagtattggccgtcggtgtagccaaggtagctgacgaaataatgtcaggtccatttgacctttcttagaagttgaaatctcaaggcctcaccactgtctattgatgcgggcaacccaaatatattaactggttatactatgaacataatgtaactatctaatcaataaaatatttgcacaataaaaagatgctcggcatctactaagtgttgtgaggccccagatcctactcctgtagggtggttccaaggtttagatctctctgtgtgtgggtgtgtctccagactgtctccacattggtcaacccgtgggtagttttgatgagtctcaatactaaaattatttatgcatctcgtcacaggctcgattcatactatgtccatgtgctgtcggttgatccatcacgttgattaaatatatcactgagacctcaggacttcaggtctaattttataagctgtacaatcacatcgccctcctctgctagactaaatcatacataggcttcaatccaagggggccattcagtttgttctgactctccgccaaccaagttgccccgtggtgaaagcacactgcgagattgagccatgagtctcatttggtacaatcgccacatgtcccaaagaggtataccaagtcgtcgaaatgctttgaaatccactttccagagagcgtgataactacggcctttttcaccgccacgaagggcattgaaagaaccaagcacggcatttctgcccttcgcaaatctcggactccgacgccatgtcgaatcaacttgtgtattttgaatatttggcagaggccagcatgtctgtaccgccaaatcggttggtggcggaatggtaactaaatatgaagcccgatagctgagaattgttggtttggaggaacatagatcgacgacgcactccgaaattgtctggagctcttctattccccccggattccgacaccactctatatattgttcaatgaagccgtccagatcacaggtataccatagccaatggtttattgcagcattatagatctgatggaagagctcaagtttccagagacctcgatgcgtccgataagtctcgatccatgatggtagatcaatatcgaattggataagctcgccaccttttggtggtggaagtattctattcacccaatctataacattggcatcggaagccataggacggcggggctctgcggactcgagacgactaatgaaacgctgaagacaagcacaggcagtgagatgtattttcgctgctgtatttacagtccgatggaccgcgcctagtgagtgggtggtggaaagggaaataggtcgtataacatccgctggtgagctagcgagctcttctagcagggcttgcggagtgaatgatgtcgatagaatagaggctaggagcgtgaaatagtaatgaagtccgtgcgaggtgagggagcaatttctcaggacgttttcggtgatgtttttgaaccagccgttgaaagcttccttcactctgggagatataggcgcttactcgatatcaagagtaagattgaagttataaagggtacttttgagtggcgctgtatagatgacaaagattacgtatcccttctccatgaggacacatcccaacccccttccatttctccccgctccccaccactgcccacctctgcaagtcatttaatctatttaggtttattatgtatttgtgttatttcaaaatccaagcattctggttttttctcttcccccctatcttcctacccactaccatccagagggtgcatctcatccatctttgctaaccttcctgcgtaatatcaagatggggtggagcaaggatcattgccctcggcatgtagcacttctagctgactctctccttcatttcttcttgctccttctcttgtctttttttacaaaaccctcatacgtgcataatttaactgatagaatgctcagatggcttgcaaacacgctatttaccaaacagtagcccatatgcgtatccctcataatgaacacgaccggaatagaccgcccggccttcaatccctccagccaccgagcccagtgctcgtgcatacacaatctcgtggtgcacaattgcctgctttgtcaaattaatcgcgaagacttgcccacccccaagaataaaccgggccgtcagcccaggggattccatgatcccaccagtgggcggataggttgcattagatctcactcggcgcaccttcacggcaaaatgcagcaagaccaactcttaattgactccagccacctctccaaggcggacctttgtcacacccacctgtccgatccattcctcagtgggcagctgtacaaccgaggtgtctggatatatgaactggccgtagacacgtcccatggacgtggagttcaagtaccattttacagagaaaggcgtgcctcgacccagaacgaagaggagcagagagatcacagtcgccagcaaggtcaacaacaatacaatgaaagcggggatgccataagcccaccggtagtggatcctgcgattgaactttcgaacaaatgttccgcccgcgttctcgtcatcagcgctgtttgcactggctgcttgagtatgccagcctctggtgccggtgacagcgttggctgcaacattcgtccagacaaggttcaggattttcgcactgccctcggcatccttggacaggtcctgccaacgagagaaaatgcccaaatcttcatcacctgaataggtaacagcaagactactggcctggatcccgtacgacatactcatggcatgcacgtggaagtcaactccgggaagattctgcaaattcgaataagggctcgcatcatgcctttggtaccccggtagatgcagccactcccgctggaaagaaacgaggtctggtcgattccgatccgaaggttggataaagccccaaattgggttcgcctcctgttcaggtagacctgtgatttccacgctccaccatggtttgctctcgtagtctttagcttcgatttgtgcaactgagaggccggcgagctggcctgttccattatatgtgaagtcgacagtcttgacaattgcccttgttgcggatgcacaggtgtaaatgggcatcataagcctatcgcctggaaggaagaggattgcttctgttccatcacgtttgctaggggctccaaacaacattccacaactgatggcgacactgcttctgttcgccactactcttccattcgttcctttgcactgggtcactgttcagcttagttagtactcgtctcatattcttccagtgatgctaagatacgcacgggctagatcaaagtcattctggctgatattgaacgggttggtgtagttcgacactagggagcctgtggtgttgactaatgatggcacggtgccattgaagagtcttctaggtaacgagccaaaatacctgccgaactcgggccatgtatgtatcctgtctcgctgtccatattgattcgtaaactcctcatggagaggaaagtttttccctatctccgagtcaagataatttgtagtgttaggaaggggattcgtcacattcaagaatgccatcgtgtaaacgttgttggcccatgctgctcgatatgctcgactgtgcaggtcgatggcatttgccggagagatatcattatcgaccatgggttcaccggtatgtagattcacaaaaccaccccggtcaacaagcgccaaattttccacctcgtcactgaagacggagctaaacagaggttctttcgcgtcaaattcaagggtgaggttagtattgacacaggcagtctccggttccagaaacaagatatcttctgaccaagcgctaccatggacatgtggcgatggagttgaatggtttcgcaatccaattcctccactcttggtgtcgacaataagcccctcgactacatctattgcgccattcaagagtaaactctgaatttgacgatatgcgccgatcaagaaccgtggcccatcatcattcaaagtgctgctggagtatgttctccattggatgtcgaataagctcgagacactctcgtcaaagtcactgaggccccctgtgaatgtctcaacgactttcgctggcaatgtataatcgtaattctcgagctcatcccacggagtgaagttcgagggaagggttgtattcgaacctctgcatcgaagaggcgctgacagtccacacaaacgattcaaacccaatacactgcggcctggtgtgccataacccatgggacctgcatccttggcataatgaaagacgtcgtgtgttccagagctatcaagactgatagcgtcgtacaggccaataggtgtgactatggcagcaatgcccactaatcctaagatcagagaggccttgaccagatgacagcaaggactggcctgtgaacgctccgtgacgcaaccgagtcgcttcccaagatgttaggccaataggaggagtggaggaaccggctcacaaccgacctgtcgatgcattagcagttcttttattccgcgtgagaatgttggggagataccatgttgtgaggttgttctccggcttcaggataccggtcaacaatgcccccagtatgacaggaagaagcagttgaactaaggaggcataaaaagcagttatgcatagatcccttctggcatatctcatacaacacaccacttaccgacaaaaaccagggcagcaataataccggccacctggctgacagtgagctccaccatagagtatgatactatgcctaagcagcataaatctcgtcacggttcgaagaagctgggctggtatgagcccagtaatccggggttctgcaaaaaaaaaaaaaaaaggacgctgatcttccattctagtcatatagatgattcctttaataaaggcatgagtggcaggctgtgctgcggctcttgggttgctgggcaatcaatattgcaaatacgaggccaagaacgaacatatatcagcaggtgcgactatgaacatcgtgatggccttgtggcgttgccgagccgccattgtcttggccatatatagcgtgcatcttttgccaagggctaagtaagaaagagagaaataattgcgttgaaggcttctcttgctggcacaaacagccccatggtggttgaatttgggaaaattcctgatttaaaccctttgaattgaggtgagtctctcatacaggcatgaagctattctgtagattcttctctctgtgctgattgtaaaagtaatgagcaagcaagataggggcaggcttactttttaccgcacttgggccgtttaggttagatgttcaacattcggtaccaatggatgaccagcccaactattgctctaacagctacaggaggacaagcatcttggcaagctgggaagacttcccgcccgtatgcgctggaggaggctttgggctcacattaaagctcttggctcattggcttaatggtagcagtgagttccgagccaatttaagtaacctcgagtttagtttcgaggatggagtgaaatatctctgtttgctggaatggtctattgcgtcgttgggaggtgtgcaggagagatactgagataggaaagagataaagagggggaaagagtggccaaggacggaaggcaatttttcagcctaacagtgattgccaaaaatggcagtatccacgtcaatcatctcctatgcactattggtccactgcaggcgcccgccccgcacaatcttctgtgacactagtgacatacatagtgctcgcccatattctcgcgggcacctgcaatcccctgaattatgatgtgcgactaattcactctcagtagcgcccgttgagcgtttcatgtgttggccgtgaattatgcttacctgccactgaaggtgtctttggctctcttaacaccatgacgtttatatgaacggcttgaattaacagtgtgctgatcgaatcttaaaccgtccaggcgttgatgaagaaggatggagatggcagggctgtcgtgcatgcggtatataccatcattgtattccccttacccctacgaagcgtttctaatttatgattggctcgcggctactcctttctccatcttggagtagggtcggactacggggagaagaaagaactcggtaatcctactggctgtcccgcctatttacagccctgtcgacgaaagtggccggatacggttagcgtatctcttactcttgttgagagtgccactagaccgaaattagcaacacttcactccgtgtgtttcgagcaccttcatcacttcttgacctgaatgccagtgtcaattttctcccgcgaacgaactacaggatggatcgaaatcagtttcaccacttacacacatagattctttcttgaatcctcattcaaacaatgctatgcctattacagttactctacccctgactcattttctcggcggtactccaatacagtcgtaaataacaatataaaaatagcttccgtatcacgcttgtatatctttcgagggttctagaatgtcgaaacaatgcccctcactcttggaaatattgcacaggatggatcgaaatcggtttcaccatttcctcacagacattgtttctgtaaccttctttcgaagcactcaataccagtttctagaaagccctcaaacaggtgaattgaagaagtttaggtatctatgaattgtgaaatctatatctgcttacacaggctgcacccacgttcccctcatcccgtatgagcgcgagaatcagcttcagccccgagtcacttagtaggagtgttttgttcacttttgctttatttttccttcatccttctcagtgatcccatactcccttatttaaaataataccggaaaaaccgagaatttaatgaacagtgcagctattggcatagtgaacccaattttagtattgtaacggttgtacaacggaattcccgcattaaggatctcccagatggcaacccacgggttgggttttggcgaggcctacctaagaacgccagggtataggatgttgttcgtgacttgatgacagatggattggttggttctcggtggcccatcagtaagttgcggccccataatcgattggtatctggtatgtccgtaacagagaggaggtggaggagaagaatggcgggggtctgacctagaggcttgcgtataaaaaaaagaagagggggaaagagggcggggtaaaggtttgtgtcatcatggccgctctgtctgcctcaaaataggcactgatcttgttcttgttgacattgttgatgcctgttgcttcatctctttcttcccctatatcatgacccattcgcccttctttgccccctaatttcctggccccgaattctccacgtcctacaaccccgcagcgcctacttctttcccgtcaaggtggccagcactcttgtcactgtaaatggcccaacgtgaacattacttcgctcgcacatcaagaccctaagatgcccgtcacactgaagacttccgacaaagaacctgtggcctggacaggctggagatgtgaaaatgccgagaatttccttaaagatgcatgcaagaccgaatactatcgctgcaagcagattctccaaagttccatcactagactccccgacgcctctcaaactcacatcagccccagcactcacggctttgtgcgagcagtatggcatgcttattcagaccaccacaatctgatcttgcgaccggaggacgtgtggttttccatcctagtccagcttagcttctacatccaggcccactcggaggaactgcgagagcatttcgtcgagcatgagggccagaagcaccttaaagtaattgaagctggaaccatcggatctgtggatgtgggccagctggcagtgcagttgaccgggctcattcagcagaacgtggtagacccggagcttcgcgattggatcatgccctctttcagtactactaccacgacggacgagattgtcgccgccgtgattatgatgggaacgatgcaaaaatacttctcctatgagatggagatgacgtgcggtattccgtcggtgactttgctcggtgagaaagacgactgggaacagcttcaaggcagaatcgacaagatttcgacgctcggcgaagagccgacccactttgcatctcttctgaaaccggttctagagaaatttgtcgcctctttcgacgactccccttcccctgacgtaacggacttctggaaccagtgtgtccattttgaatcgatgggaagtggtcctaactacctttcaggatgggtcacggctttctgcttttgggacacagacggaaagagactttatggaccccagggcctagaatgggcggagaatacatatccccggattaacacgtccgatataccaattggatgcgtcagtgtgcccgtcaaggtgaacgataatggttgtgagctcaagacctcgatggtcgctggcatggttggtatcgaggcaaagtccggagcgaacgctctagtatttgatggacaactggttaaaaattctatccagccgttctcgggatggtggatgtttgaggaattgagtgagacggcacttacagaaaagaaagagaaggaacgtctgagggaagaggctttctacgaggaaattagaaagagattggaaccctaaagggccttgcggcaatgactaagaaggtgaaggaatgaagagtgaaatcatgaatgattgctaggctcaggaatgaccagaggcttgggataaatttcctttactactctgtatcatacctgattaggttccgttcatgctcgataatcgggtacttcttaagatggtacggaattctacagtagataggctcatgctttgaaggagccaggcatgggactatcttggttcaactactcataattgattgctaagagacccctcctcgggaggctgtttggaggtagagcatagaggtgtcgaatgtagtattcacaagcgaatatggatgtattcacgaaagaagcaataacttacacatcctactgacaggggtactccggaagaacccccaatatagagcgcgttttggcgttggagcctcgagaatcaatcgaagagggtaggtggttgcatcagtttcggggcgcactgtatagccattggagtttcggaacatactgtagcttccaccgacgtctgtaccaatttccacaattgaggaagacacatcgcggtagagatgtcaataggcagtgaaacgtaaccgcgtgttgaccctaaggtgaaaaactagtgtctaagtacgtgaagatgactggtatttggccttaagtgagaaggttcctatttcggcatggtcttggtaagcatttcctttttcctttcatgcgtcctgccaactaaagctgttatcaaactagtatagcttgatgtggtgactctaggaaggcagagatccaatacgacagacagttgagctctagcaaattcatggtcgctttctgcagaaggcaacatagtgcggacaatagaaaaagaggaaaaataataatgaagaaaaacgtagaacacgaaaaccaaagatatgcacgtaaaaccatcaaatatgtcgctgcaaatagttgctgcaaattcaacacgtgggtctcaacaggcctcaatcaagaaatgtgtccttcaacgcctcctatcaagttggtggttgacagaaaccgagaagcctacaaatacgtcctctatccccggcaatttactctacgattattcacctggttttgcaacgtcgagaggcttgtgtctgacgcgctcgataagttctcccttttgatggaatactggaatttataccgtactgacatttatagtatacattgtggaccagcaaatcagacagtgcctgtaagagatgtgattccaagcagcttcactgtcccattcacgccagtcaatcaaatatattagatttgggttagctggtcaaagtgtctatgcgaagtcgtctctgctatagcagccgactgagttgatctactgtcacgcctctggatggacttcaaatttgaagcacaactgctcatactttaggtatgtgaaaacccaagttttcggcttagggtttatgctgtagatatgtagaggtctggaaatcctgtttgaaactgtactgacttgaaagacgcgggacaaccagatccatggacattcgaccatacgccagtgcaagggccacagcttcttgtggtctcttcatcctggtgttgactatcagaacatgtgagttatgggatcccacgctgatctactggctgataattgacagtgaacctttgggagctcaccagagtggccctgataaccctgcactaccgtcagtgctccacgcaaagccatggcttacacacgattcctagccccgtcgcttcgaacaatgcagcatgtcctaggtggaagatcgcaaaccaaggtagcgagtcaacaacagggtgcggccatccacgtgcgaacttcgttgcatagaaccttgagactcccatttccatgctaaggtgagtgaaatataacgcctacagttgcgctgtgtctgattatccgcgccaagccttattcccctaactacgaacaccactgacatcttcacactattgtaggggcacccatcatcgacggtgaaatatactgtggcgagtggcctattccgccagatcgaagacaagaccaaggtgtcggccgacgagcgtgctccatcgcgtcttccgccctcgtccccaccgccttcgcactattgtggagccctgaacctctggcatcgcgacacattcatccaccatggaagtgcaatgtttatcacaagcgcgttcgtcacgcgcgtttactgtctcaacaaattgtcttgtgcaccccagcgcggcttttttgaagcgagtgcagattgcgatgagcttgagtgcgacgtggcatggctggtgactgcattgaagagagttgtaagtgatctagttgtgaagccgatataatcattgcgcaaactgattatcccgtcttaagcgcactttgggatttccatgaacaggtacgctacgacaactcgtccaactagatcagtccttgctgactcggatcgtacaataggagaacaccctcatttctgtcactcgagtcgaatgccacgcgaacaaatatcttgtctgctcgagctcccctatacaattacgattgcatgctctctctcccttccacataactactatcgacaatgagtcaccagaaagttcgtgtcgcgtacctcggcctctttctccctagtgattctgtgtatcaggtcattgttcgatttgtctatatgatacaacccctgaactccgattagcctataccactacccgaatcacacctgtggctaagcgtataacctttcaaataccttcaagtggcgtaggctactggtatcgaatgcgtgatcctcgttgtcttcggatgacatttggtatctttccagaactagaaaaaggcacaggaatgctgatgttttgtcttacttcctggcagatgggcgattgttcgatttgtctacatgatacaactcctgaactccgaccagcctataccactacccgaatcatacctgtggctaagcatgcaacctttcaaataccttcaagtggcgtaggctgctggtatcgaatgcgtgatcctcgttgtctgcggatgacatttgatgtctttccagaagtggaaaaaggcgcaggaatgctgatgttttgtcttgcttcctggcagatgagcgtacctctgcagacaatcaggctgttagcacaagtccacctgcaaggggaaggagacgcaaagtcttctcatttttagcctacaatttgacattggacatctcaggtacaaaccgagaggataagatcggggcacaggcaagccaataagagctcactacccaagaatcacctcgggcatacaggaagctgcatcataagggctgtcaaaagtgttgtggtatacccagttggttcttatacacgcatttcctatccaagccgaagcactatttgcaaagaccatttaccctaggtgtcacttcagctgcaggttagtcaagtcaaccgcgcgtattctttatccgctcatatcgtctcctaatatatcacgcacttgtcaggaaatccggattccctacatccctatttcgacttttttttaaaaaaaaaatcatatattcgtcgagcccaccggacacgtgggcatgttactgttcggccaggcagccactgtaaagaatttggtgtccgaaaccagaatgtttatgggacctcttggactagcccctagatcctggagcaattttcccaccgtcaatcaacactcatatgatggttgcttttggaaggatggccggattgtctactacgactacgagcgaactagcactcctgcgggggatatcacctaacggatattcgtttcagacaacactactagaacctaatcgggtttcaatcaggtcttaaccgtgttctcttatcagcagaatatggttgattgtattaacctgggacactgcttcctaaaaggcaattgccgtcacttcgatccgggattggttgaaatatgatccgtcgttgccgaggcatagtaggagccaaccgggtattctggattgcttgcttgtccaaatctctcagcaacatggttgtctctgcggtaaaattacaatgattcttgcgctctctgggatataagagctgaaatagggtaaggtcgagtgactcaatcgccgcctcaagtgatggctttgacttcgcaaggcataaagcctaccgcatggctaattttactcaagccattcgttcggcacctcatcatatgcttctacacgtgggtcttgggcgtattgcttggtcatagttgaaccagtggatctactatccctatcggattgaggctgtatgccaacttcaccgagtgattattacgaaatagaatctatagtgattgatacatttatccatgcgggtgagatggcatgaaaatctccgtactacgtccgtgagacattgatagacctcgccgcgggccatgaggcccatggattcgcactgagttacttccccctgcctatgggcgggcgggcggttgaccgtagccccgtgtcatttaatgggcccatgtgtcgcttaccaataaggacttcagttacatgaaattttataattttataatgtttagctacgcacgtatatgtcctataatgctacgtattcaggttatttgagtagaaagttatacaatggatgtgttcagctataaccaaacctagtaaaagcaatggactatccagtgtaagtgaaattgaaagtgtgatccgaaatacatagaaattgtgatgtatctgtattgcgcgtaaatatatatatgactacaaaacatgctgaacctacaaaaccactcacaatataatgcctaccagcgtatcagtaaatttattataaacacgacatactagttatactgcatactaggattcgcctttattatgatcaattatctgctatactagtggttattgggggtaggtgacaagtgatagatttccaaaagttgaaccccctattcaggaaacttacataatctgagggtggcatggaccgatggcaaggcctagacgttgaccacctttttcaccgcccgaccattcaccaccacgctcaccaccacgctcatcaacactcatcaacacacatcaacacacatcaacactcaccatcaacattcaccatcaacactcaccatcaacactcaccatcaacactcaccatcaacactcaccatcaacactcaccatcaacactcaccatcaacgctaacggttcaacgcaacaagcattcctagacaacacccatctctgtttgcctacatctgaatgaaatatgctaatttctattgtagtgaggaagctattgcatcacaagctaccaagggaaaggaatgtgaaatacgtcatttggtactgaagaagcttcagttgttagtttatgattttggctattgaattggcaaagatctaactagggccccttctatgtatccaatgatgacccttcggaacaacgaacacacgatgaagatgttgtgcaggtctttgcttctccgaatactcttggaacactcgaatactggtccctagcaccacgaagaggtgcctgcacgggctagaggctcttgttgtagcagatgtccctgcgaggcgctttattgacgcagggcctaggctgcggagaaattggtaatgcagcggtctcctgcgggtctcacttgtcatcacagcgtccccctgcgaagttcatttggtaacgcagcgcccccctgcgaggcatattgatcacgcagacctatcctgcgaggattgttgttgacgcagacctatcctgcgaagcactcttttacatacacaggggtcattggctgtgagggagcgcaagtcttacatcgctgggctcgtggcagcgacagccgtggtcatggaggctctcaagcccgtaggcacgagaggggcaccatgacacatcggagtgtgaggaccggagttctgattttttttgggctgggaatccggctccttttatatttttttcggctacgtctctaccaaggaaccagttgcgcagttagtagcgagaaccactgtctcgttattatcgttgaagacatttgaagaacgttgaaatggtgttagcagactttgtggcctacagactcaagtttcaacctggattcattgctttcaaaaacctgcgtttagtatggtgaaccactttttcgactgttgaaaagacagtgataccgcaaggatatgattctcacatatcattgaatttgcaattaaatcgctcaacgctgtggcagactgactactctgcccgttttgaccatggtcactagccacggtcaccgtctttttcatgagggttgaagtgcttcagcaggtgccgcaataatggggtggagactttgtgtacccgtggttggccataagacgtgcctcccattgctccctctacaatcccctttgcctagcctcgcgctaacggtactttctgtatttctcgcaaccaactgatgttgcctctactaatacttctgctacctgtcggtgcagatactatgaagatactcccaaatccagagtattggctgttttcctttgacagagaatcaaaaatcgagacctttttggaaagcctagaatagaaacccgagtctaggttccaggacaatgaagtgagttatttcagctcccatggctcacgagctaggttttcgtgatcgccactccctcgcaagattgcaacgctactatcacacactggcgagaacctggacagaagtaagaccgggtggaccaattaaacaccacacgttaatttagacagacgcaggtacggttctgcgacgcagatcttagcgacgacccacgggatagtagatcaaggaggttctatttgtggcccggagagaaattggaaagaattgccaaggtccagacatgatccacaagcccaaagttttcggccatcagtgcccgatgacacggggcttttttgcttaaggggtgctgctggggcaggtgagtatttggaatatcacactgactttggcgatagagtggcaggctaaaccccgacccgtggttgtgttcttttgtgttctcttggtcgtacggtcgaattcgaaatcagttttaaactctaaactcttgcgactttattcccggaacttgggtggggacacgctaatctaattttagctcttcacctggtaatccttgtagggctgtattgtattctctagtaacaacaatgactcattgttatagtaccgtaatcgctcgtagaacccgatggaatccttcctgcaaactgaccgaacaagagataatcctacactgattttcgaaatccattctaattccgtctctcggcggacatatcttttattttccatgctcccgcattcaagcgtgctagatcccattagtagatcgcgttatgatatctttccgcaggcctccaatttgtccttcgacaattcgtacagttatctgatttctgtacagcttttgtttgtgtcgtatgtcccaatgtcaccaatgtcccatttgtttcccagactttaaatactggaccacgcgatcttaatgttctacggaatatctctgctagtgatacctatattggtaattgaaagcagtcactgaaaaactagctctacttccacctcggagcgctttgcgctcgagggagccatttctgtagtcgagtgttcgtggacacttgcaatcatgatctgtccctcgggaagttgtccgaccacatcgtcatcaaccacgacttttaagcctttgctattgatccagatgatatgagggatgaggcaagggtcgatatgcagtttcgccgcaagttcgactttcaaattgcgagaagtgcggcctgtaaggtatattgcatgataggtgccctcgggttgctttccgcttagggcgaacaggatatagaagcatgcaactgcgaaatagaagtgagcgtagaacgaatttgattttctgtggtacgaaccggattttgaagaatgctttgcaggagatggagaactctttgatgccccaacggaacaatatgggactttgggcggacgttcttgacaaacagggctatgggagtgcacttgtatgttggccttgtttggaatttgagccgctccttctgataccaagtttatagcccctgtgctatgtcgatcgtctaagagcctatccttcatgttaccgcgaagagcaagtacactcactagacgggccgatgaaagaacctcgactgttgtggccagctcagcgcggaggacttccgacgtagggcttttccgaggacttatcgacgacttgcgcttcttgtgagacgggacatcgaattttcggccgtttatcgcactctcgttgtgacatcgactggcaaagttcgcatttgcctctcggtccataattcttttgctgagcttttcagcccttttgcttatacgtatcttatcgttccataatttccgttcggcaccgtggtctctaagtaccttaaccaaagagtaacacctttccggctcgttcataacagacttgtttctgtcgttcgactgtaacatttccgtttttgtacacagcctgactggtaccccttttaccccttttgcgcgagtgaagtcggtcggtacaaaattgaatttcagcagaatcactgcctcataggccttcgcagttggatcagctgtccaaatgacacaaaagtcattgacagaagcttcttcaagctgtacctggcagtgtccctgaattcggaggccgctctgggaaggctcgataaattcgacagctaaaagcttgcctttccgctcattggcttctttcagaccacggccttctttccatagctgccacgatgcaaccggatttgatctctggtcttctccctctaaagacacatacacaaatgtcctgtactcaaagaatcccccgttattcgtgggtggggtcgaatctgccacagtgaggctgtatggttgacctttgttgagatatgttacaggcttttcgttgccaggctggtgcattgccgtcggggcttgcagtgtcgcattgtaacggaacctatgaagagcctcagcaaacaataaatatagcgtgcgttgggcataggcgtacttttctctgtgcccatatatccaatgttcgttgacctgtgccgtgggtgtggccaactcagattttgggtttgattgtccactgcaacgactagtgaaaatatcttgatagacatcatatagcgtagagtatccagaattgtgatgaacgagagttgtcgatataccattcgcctgcccaaaatgtgtatcatcatatggccaaccttgggacttagccaacgaagtgaagcaaggcgcattctgagggtcttgcggattgggttggactggctcatcaagaatgcgcgaaatgtctgtgctccactgactcaacggagagagtatgtctcctacgttattgtataagacagcgtccgaccctgatacattgcgatcgtgaaatgtctcgtacttttccacgtcaatcatcgaagagaacgaatctggtgcatggaaaccgcgatgctttgagtaaccgctctctcgccttgatgtttgatcggtatttgcctcgtctgtgggcgcaacatcaatagggtcgtctccattgacacagctatcagggagcattggatctcccatgtcggtttggacgcctctaatttccctttcagcttgacggctcaagaaacgatcaccatatttctcccgaaactgattaatgaactcatcatatggtctccgcatgatttatagttgtggcgctgggatgccaaaaaaagaaatattaaagcacaaaaaaagaaaaaaaaagcggcattcctaaaagacagagcaaatctgcgttactcccacccttgttgccgtctgcactcagcagaaagatctcagcccagttaccggctccaccgctgtgcgtgttgtactcttgtttctcccggcactggccatgatcaccgtgggtcttcgagcaagacatcttcaagaacccaaactggcaacgggatattaggcactcgagatgtagataatctggctagctatcacgtggttcacaccaagttgaacaaggatatttagaataattttgctcctcaaccttcggagtattgtcggataattgtgaattcctttttcttctatacgaatttataataaactcaagaagatcggtgaaaattgaaatggcgtttaggagacaatgcattggcgatgagtataaagtgtggggcagaaacactttcagtacatcttctatccctttttctttttccggggattcttaacgagacacgataattggtagtgggtagatcatttaacttccataagtaaagggatcaactcgaaggagaaccgtgtgattgctgggagtttcctccgggcccattgtccagttagtctgtgtaaatcctcgtagatggaggtaagccccaccggtacctcgcggccaccaagttttataaccggccttcgctggtggctctacatcctccaactgctctagggtcagcaactcgttctcattcgatctgtcaagcctccttggcccagtttataatgaaattgatacactgctttcaatcgacctgaaaagggtcctcaaagcatatcatggagcatcacacttctctgtcttagcatatattatcggaacaacaactactgctatagcaatcgcgttagaggctatgtggatggtttcccaatggaaaagcattgttggtactcctacggcttcctggtggctaaggctagtaacaatttctctttcatctgtaagaccgacgatagccaaagtcaagagttatatattaatgaaagctcagcttgcctccgttttcctggtatgcgcttccgccaccataacggcaattcacgtgtccattaagtcggccatacaggacagtttacaaagtttgggagcgcatgcaagcttgggtgggcttttggtcgcggcttggtttgtagtactactttccgtttctgcctctttcatgttatggttcacccgacttccctgaattttctgcacccgccaacgctgcactatatcctgaattgaatgtttgcagccaatgaaacgttgttgtagtccaaaacaataaacttagattttctttgttcacacaaatccgagttaattccactgggggagtttggcctctgatctgtacaatactgtacgcagatgatagacgactcattcaccgtagcgcttgaggaatccaagattgggcctcttcgccgcgttgactggtaatggccctggtacaagaatattcggctcacgaaagacggaagctggcgctcaacctttgtatcccccaaataactcatgtttctggatcaacaagcagccattcaggtgttagcgggctacgcatcattccacgaacatcaagaggagtaataggtgaagggtatgcttgaaggctgcaggaattacgttggagttatcaaggaattttctgctccttaccgctttcagaacttccagggtcggtgtatatattcttagagtggactttaaaacaagaaaacaacattgaaggagttgtcttccaacctcttgaggtttatatttccagcgaggcccatagccagacaacagggttccattcacagtagcctgatacctaactgcaaattgtgtggttgccggcaggtccccagtacccttcacttgccaaaaattggtttcgcttgaagcaacggatgcagatcaagtgatagctgcaacagcttttggccagagtagaacgatagtccaagcagtgttggaaagatgccaggtaacgccagaacgcactaatcaaagcctttacagactaaaggagagttgcgcaaatagtggctcaagcctcggtggggtgaggtcatactactgaggtaagggcgccattttaatcctgatgggtgagaccagctggtaccaaaacaattcttattgatggcctcttttacgtttcgtgaaattgccctatttaaagaacatcactgatattgccacacttatgaacgttctccagtcaccgtataaattccagtcaacgcattcactgcgatttgagaaggatattttctgattgagtggccctacgaagaatggaagacctagagcgtgtgggaaaattaattgcattagcactttgggccctagccctcgtcgctattggtatcttgttcggtggatgcacatctacgtcttcattatcacgcttctattttgttatgaccttcatctcgaaggctgagtctaggtgtaatggcaaagagctgtcacggggattcggcacacacgaagattcggggtcgtcgacttcggactagacatgaaccatgtatccattagacttccttcaatctggaagacaaaataatataccgttgtttgtatttctggcgaaattgattcctcgggagccttatctttggctgttccagttccatcagctactgacgctccgggaggttgatctatcaactccgacttgtcgcttcttttcctcttctttttcttcttcttttccgtgctggccatatcgctgtaggttgttggaacgtcctttcctgtctgtttcataagtcgataggacccgcgagtttcatgtggtggagtcgaaggggtttctataatcgcttccttagcctgagaaataggctcggtcgcacctccagcaatcacgagtcgagctttgtaaactaaagcgaccgttaatgatccattctctcagacgttggcgggggctaactcaccatgatcggcagcgtgggcgataaccagattaaggtgctcctcactgtcctcaattccgcaaattgtgaatacctctcgtatctcctgggctgtcaggcccaaaatggctttatccatggcgggagatgatgatggcaaaagactaagactgcgtcttgtcaatgaagacagaaacccttctggaacgatcggggcaacggttgccctctggcttggggggagggaagaatgagccaatcaaatcaaccacaggcgaggctcacaaaaatagcatcaaccaggccaggcaagacttgaccgcgattgacccctctttttgttgtgtctgtgtcggccattccatatcaaaaacaaatcaaaccatacaactatgtaaatggttctttccgtaaccttcaccgtcaggataggtgcaacgcccatctggtatatgacttacgcgcaaggacaggacagagctttagagaatattcgctttcttaggtcttgatctggcaatgttgggaaagacaatcggatcccatcccttgagccagcggagaacccatcggtgggtgcgttcgtcgccaatgaggtcggtgaatttccgggctcggtatttctcagtccacattgcatatgttgctttcttgctcttatggctcatattattcgattcaatggatcgttggacagcagggggcggcggcggcggtcttgaagctttctcctggctttcttgagcagcttcgtcaagaagtttatggatatcaattccgtagtagctcttctgagcccatccgggggcggttgtagatcggccagcaacaagtctctcgtagggaatggcaggtttgctaggtctcgaagcgacattatgcgatttgcccgagcacgttttgatttgaaataccccaggcggctttctcgacggaccgggagattcaacaataggctctcttgcgacaggaggattggccaaaggcgtcgagtcgggcgacttttgcggcggtcctaggataatcggaaactgtgtgggttgcacggtgggttgttcttgaatctcgaattggctcatctgcgcatcgccaaacgcatccaatgcgtcttggtcctcgtcctcgtcctcgtcgtccaggaatcctcccatgattttctgccgcttgggctcggaggattgcggcggttcgtcattctttctcttctgcgggtctgtaggcgaggggggtcctgaggggaagccagcgggcgaagacatgaagggcattttcaccgtgggaggagaggaaggtagtagtggtaataaacgagcaggcgaagagggtatgatgtgttgaaactgtttagatttggttttggttggagtgtctgccaattagtataaaccagttcaagtcttatctgcacaaccaacttaccaggtcttatatcgtcgtcactgcgaaaaacatccgagagattccaggcgcgatgctggatcacaactttatcgcgagtttgttcaatgcgctggatgttcaaagcctcgaggtcgtcggagaaggactctgaggggagatctaggatatcggagtggaggtgtaaggccggatcgaaggaagggggaactgatggagacgaagtcgtcatcaaaggcgtttagagagtcatttctgtcgtggatatggttactggaatagtcaattgtgtctgctgtggttattgtgagtcttgagattgaagttgaatcgcgaatcttggcgcgtcaagacgcgtagaacacgctagtcccgatttgtcattaatgtatactgcagcgacaacgacaacgacatctcgacttctactcaccagactcgtcttaaatatcgacttttgaatagcagatttctcaatctctaaatctctcactatgtcttctcttacgatacatgataatacagccaaaccagtcctataacggagaatctcatttatatcagaatatatcatgaatccagtcccattgaccaattcaacctcaaaccctctggattgagaatacccgggaccgctcaaacatccccgatgaagggaatgtcggtccaatttccatgggcaatatggatgccaaccttggtggcgatcaaagtaactgcgattccatacgatacgtacttggcaatttcagctacaaattcgacttctggctgtgtgtctagaatcgtcgttagttctgcgaatttgcaaaccacatcaatgagagagaacatgcctttgacgaagcgctcaagcgctccgctccaggacccaaggaggagaaatgtatgagttgcaatgtcgagcccactgtcagtgtcattcttccctttccaatgcggcgtcttgatttccaagacactcgttgcgacggaaagagaatagacaatggcttgaaggattgcgtccatcacagcacgaaccttgtctaccaccatcttcgagagcgctgtcacaaaatgcagtaggatgttgaatcccgagttgaacaatgaaacaaaccagccgatcatctgcaacgtataccctggattttccttattcttgggaatgctgtgcaacgtataaattaaaacaacagcatccagaatatgttcaagcgttactttccctccaccactggaccccgacaagtcggcaagagccaccagagatgcagttggtgaaggctgttcgactagaagctcctcatacaagtcagttccagactcaaaggcaagtggcgagatggaatctgggacactgagaactagggatattccaaacgtagctgctcctgtgatggcagcaaatttgttgaaatctgcatctttcgcagattgaccgtctgccatttttttaattatggcagcgtaccgacccctcggaatggccggcagcttatcaccagtcgctagctttgcaatgaccgtggcgggtatggcgataatcaacgccaaagcatcgagaatggtcagctcattcccaggcgagatccacatcttgtagatggaggagaagatggggacgttgattggagtggtgaggagcccattgaacttgttgatgatggttttgatgatattcaaaagcagctcggtcagtttttccaccccgtcgatgcagtcggttagaaacgtcttttcggtctgctcatgggcatatttggcatcgagtgagcgtttcccctggggttgatattcatctaccagcttcttttggcgtgctgtgacttttccatggtatttgtcctcgaagtttttgaattcctgatccaaattcccaattgcctggctttcctctggagttgccatatcggaactgaacacggtctgcagaaacgtggatgcatctcgagcgcctccatgattgaacttggttcgtgtcagcaatcgataaattccccagagatgctgctgcgtacttggtactgtgcccagtttgaggccatagaattatgaattttgctcttagactgatctgttgaccctgttttatcgtctgccttgataccaagcttctccatgtcgtgattgctgggccgactgtctgagactgatttcttcatcgattcaaagagacccttagattttcccttcaaggaatccgtcaaaatgggtccctcttccaaggcatccttgacaatgttcacaatcgagtcttttgtggctgtgatgtccttccagttaaaaacgaatcctaaccaatcgatgatctttttcccaatgtcaagaattttgttgaaaatgacagacaagaccttgcccacttgatcaacagttttcatggcccattgatagactgtctctcctatctggaccagaactttggctccattcacgatgaacgaaatgatcttgtcgccctgtttttccaaccagtgccaggctccctaaaccagatctgttagtgagtcatcaatatcaagaagagactactttctcaaagcatgtccttgaccccgctgccagctccctggattatgtgctcggcattaaatctatagcaggattcgagtgccaccgaagacggggttttcccttgggcgatcgaatctctcgttttcatgagttgatggatgtttcctgccacttgttcaatctgctccggggtcagcttggtaccgtcgagtagcttccctttgccgggacctaaatcgatgttcaaatcttctttgtgttgaattttagacagcttctggttgatcttatgagctggatcaacaaacttttgcgttgattttgtagaggcctttgaagcatcggtgacagtaaacgtgtgtgttgaaatgtcatctgttggcacagtgagagtgagcaggccagtttggtctgtcctgactgatattcctttttcagtggcgagaacactgcgaccattaacaatcacactcgtgtccccagacgctcgcagaatcaccggatgattgaccaaaggaccaccagaggcgttgagtggttttatttgggtcatgtaggactgcatctgaatcgtcttgtccaaggatggctgaataaggggaattgttttccaaatccctgattttgcgtcctgctccaacatggacagattgccaacattgttagcaaagacaaatgtctcacacgaggacgatgttgctttaaacggagcaaagtaacctccctgatgatccgggaccacctgcactgggggatcgggcgattggaaatcgagatccgtcatgagatatccaatgccattgtcagtgttggccgcccacagcgaagcttttgaactagaccttgtgacttggacctccttgactgaagagaagaccccggtatctgcgattttatcggatgaagggtgagccaatccctttgctttgaacctataaagaccagaacctccaacgaggagatcagtgaagccatcggcgttcggtagagctgccagagctcgaggatctaggtctgttaggaatcacactatacgggggtttatgaatctcattaccggatggagttgtgtctgtctgaagtcagttatgtatcgataaacccttcagaagactcaccagaggcttgcttgagaggcacttcaagctcgtgagggacattgatcgagtaaaaggtaatagcttttttgcctggggtactgattaacagagttctacactgaatgctgctctattggggaatattaccttgaatcaagtataaaacggcatgacccgggattatcttggagccatacttcattaccaaaggctgtactgcgatgatcatctccgcattctctggaagcttcacattgtcctttttcatccaggaatagctgtcctcagacctggttacagccgcagacgcaagatcttgagagtggtagttctcttccttgaaagcgaaaacaactggggggtagtttttgccaacggcaggggcctgaaggtcaacattggtataaaatacattgaacaagacttaccatgaaaatgtcaaacaccctggggttatcctcaccacttccagccatgacgaacgacttgagatctaccgacgaggatgaaaggtccacctcacgaggttcaaagggccgaagcaagcatagcaagcttcgagaggcattcgagtcatgcgcaatggccactgcgacatacaacttggacgctgcgtcctggaccacgtcgaacgcatgaccggtgtaggaggatgcaaagcccagcataaggcccagatcacgcacgactcgatttccagacttgtcgagggaggagacgtataatttggagtcggttcccaaggagaagagcatcaattggccatttttatcatggacggccacgaagcgacgggagtttgggacagacacagcggcgacatactgggtcatcaattcggaatcatgctgaatggtttccatggtgttggaggtgcttgaattcttgataaagagggcagtaatggttttgacagatgaatgaattgtgatattggttaagaatagctggatatggcacttttatgtctgaaagttcacatattatttttgaatgtcaatactgatgatgtctaaaggtacttttgcatccaactcgtacagctgtcaacctgggcagaagctgtactcgatgcagatctaaatgaggggatccaacacggaccaatgatattgccttacggtatatcaatccctctagctaagatgttacacaacatggtctgacatttaagactcgttattggggttctgtggctggctgaggataaggagcacatgctacctattttagccgactccacatctccatgcacgataaagtaaatcgggaaatgatatgccatgagtctacgaacataagcggtgaacacagcctttcgagtctcgattcggttacatttgtgggcgctgaaataaatgtctcgtacttcttgaatgtgaaccttacatcactgtctcacttcagctgaagcatccctgctttgggcaatggattcagctggcatgtgttgatacatcacggcgatcatgttcagctgaaggaatacttatcctaggtggcaacatggatttgtatactgctactacacatggtagacagtatgagggatttagagagttgtgcttgacgctgtttgggatgatgaggtaatagtaagtacgatcgatgcatataagacttgcaccttctttccttctcaaccatcaacatccttgaattcacccttggaaatatccccaccagaacagacatggcatcggaaaaagacaaacgcctccagtcgtctctcaagaccgcgactggggctttcgaccaagccgtagcagtgtctcaagacgcgctcaacgatggcctgtactacctgttcgacaagtacgaggacttgcagaagatgaaggtcaacaagaaaaagtttggccggatcgatgcgatgatggatcatgccgaggtgtctctgccggtcaagtcttccagttatcggacgctcgttttttattgcatttttcaaacggggaagcttgttctcacggatgatgatgggtatggatcgatgcaattctgagtgtatgatggcactgacaatggatccagaaatgacaaaaagccaatcgacctggcagactggcggtttgcattcgaggtggactataccaccctcgatgtaccatcggataccaccgagcatcaggaggcgaagaaacagatgaaccagcctggcgactactccatcaagagacttttcttggactttaaaagtgagcgatgaagctgcctattcgtagcaatcactaacactcactagcccacaagatcagaaatttcaacaaggacctgagcgatttcaagggccacaattgggacagtgaagacttgcaaagtttcctctcgctgataactttctggggcgaccctgaaaaaggcgttatgaaggacaagcaaaagtcgacactgggatactttttgacgactgcgaagcccgaaacagtcaatccgcccgcaccgacattcccacccacctccgtgaagcatcagcattacaaatacatcgcacctgggaagcagacacccgacgaaggaccgaaagatggcaagaacaatatgcttttgtacttggagatgacccagaaccgttccttccccagtgaagacatcctggagtattcgggcaatttcgtgactccaggcatgaagggaacaacgtgcatctcccgagacatcttttgggattcgtatcttctccggaacccgtctctcagtggtccctatgggccacagcctcctcttctgcgcgagttcaatcgacatgtctacgcttggcttggggaattccacgtctgggccaagaactattccaccgatctttcatggagctacggatttggacacacccggtgggagccatctcgaagcccagactacttcgcatggaagaaggtctctgcaaataaatgggagtggaagaataaagacaaaaagagcggccatgatgaaggaatatggcctctccgtttggacgcaaaagcgagcagtaagcagtggctttggcattccataatgaatctttctaatgacatcttactaggtgatacgttgaatgaattgaggtttgacccagggagtaacaaaatacatctcgaaggctgctcgaaagtctgggcagaaatgaaaaggagcgatttccagaatatagaagaaaagtgagtgttctgacatatatagcctatccgtacattatgttgatatatgtgatagaggcggtgttgccatcaactgggcgctagatatcactatcgactcagtcagcgaaggagggctgaaactgaacatgaatcttccagccaatcccaaggacattttccacaccactgcactgacaaagccatttgctacagaggccgaagagacgcaggatgaagccgagcccgctgagaatgaacccgctgagtccaccccgaaaacaggaaagactggtaagatcagtgtccatgacatgacagaggcggcgaatgatgcagctgcaaagctggatttcaaaagcgtgacgagcaatctccagactgcgttggagaattcagcgcgttttgttcttcctggaggccggcagttcttctacaacaacgccgtctttggcaataatggggatttgttggtggaggccaagtacaagtcttgatggactgtgagctactatggtgtacccatatctatattcatatagttataaagagtagagtgtccataaaatcaggtatacatctcagctcgatcctctcgcattcatccacagatcccagcccaaagctcctccttccaccctgccagctcaactcaatcatctgctttgcaaagattcgtagatcatcttcatattctccaataaccctctcatccaccatattaccagcagcagcaagtctccgtgctagatccgctgcatctcttaaggccgtgttggcgcccattccagcagtcggtggcatggcatggattgcatccccgagcaacgttactcgtgaggatttccaaataggcaactctgggggtgctgatgagatacgcagagtcgatgtttgtgctctatcctgcttttcgaaaactgctcgcagcgcaggagtccagtgctgtgtcagacggagcgccagatcagccgattcatcgttcttcagacgtagcttatcgctgcgtggatggtccggacgaggactacttgccgtcttgtctcgacggggttgacttccaggtcatcctcccacaacacggccttccttccggcgtcactcagcagcttgctgatgctttggcaactgctcgcgagagtacgaccaccacggagcctttcacggactggcgtgtaagcccagagggactcgtcctgctccgtcgtttgccaccaaattcccgaaaccactggcaagctgttatcggacaagccctaggccgaaacgatgaggaagacggcacttgctgcagtcggtgcgagacttaagtgctgacagtgctcttctaggctttccgaaaacactaggatgtcgtccagataaacgaccactgaatcgccgaggaagtcgcgaagtgtctcattcatcatcgtctggaaggttgctggtgcattacacaacccgaatggcatcacacgccattgatatttgccccagattgtgttgaatgcggtcttctcgaccgcatcttccgagagtctcacttgccagtatcccgatgctaagtcgatcttcgacaagtacttggctttcccaacaatatccagtaggtcttggatacggggaagcgggtagccgttcttggcagtgagttcatttagggcgcggtaatcgatgcacatccgccacgcccctcaggcttcttgacaaatataactgggaatccccatggactcgaagacgtctcgatcagtccacgctccagcaagtccgcgaattgccgcttcaattccgccaatttgtccgccggcaaggggtaagcttgccggttcacgggatctgcgtcccgtgtgtcaatgtaatgttcgtatgacctccttggaggcatctctttgggtagttcttcaggaaacacatcctgatattcctggagcaacttgaggatcctgggttcacttgaagaagcttccggggttgttgccttggccgtacagagtagcatctgtgtctgttggtcgcgaagggcgcgtcggcaatctttcttcgacagcaagttaagactgctgacggatttacgctccaggatgcgcgtatcaatcccatgaacctctgtacgcttatccccaagccacatcttccgttcaggaaagctaacatattggctatgttctttcaggaagtcgttccccagaatcacatcgtacccagcgatatcgatcgcccatactttcttcctcccactccactcgccaagatgcagatttacggcacaactcccttgcgtgcgtaaggtctcaccattagggagggatactggaagggatttctttttgtcccatctcccgccaacgcgctttgcggtggccagcgagacgaatgtgtggcttgctccacaatcaaggagcatccgcgcgacaatggccgtccgcgcttcgggtcgctggaccttacgatcgaagtaggtcagctcatctcccagggcgttcagccgcatagaggcttgctcatccggcaatggtaattctcccacttgcccggcttcaaccctgctggattggatatccatctcgacgtcatcgagtcgaggatcatcactttcttcatcctctaagaggtcttcaacctgaacaggttgggtctccatctcgatatttgccaatcgaggatccttattgctgtcagatccggcgactctatccgcacttgctccgcttccacgtccttatttatccaaagcatgcttcggatcgcccatctgccttccctccaggtggagggaaccagcttccgtactcgcctcaaagaacacgatcgtcgtcctggatgtgggactatgtacatcgtgtctgtgccgccaggaagctgagataccggcgaacagaacgtccacactagcagcatgtcatcgactggagcgctacattgctatgtcgaagaaacagtggccaactatttcgatgatatagtcctggtgtatgctattaccataaaggctgtgcttactcgacaatgaacactcagcacgagagatataaatcactccatggatttcgtataggaaggagcaatcacccttgtttggaattacaacagtagtgagaaagttccaaagtcaaaggtgaacattcgagcatggtcgtggtgcctctgagcaggcccagctacacagtttcgtccttgtcattctaaaccaggggcatggcccatgtggcctgcaaaatattgcggacagtgtataagaattcacggtactatgcgcgttcccatagagagataggacagggtaggaaggggctctggcactgaaattttcttagctcagtaaaatatacctggtggggtttgattgaatcggtggtcgaaaacagtgtgatctgtggagggaagcgtccgatctgctttcgacccacacccgagtcacaaggaaatttaagtttgacacagactgcggaaccacgagcgggactgccgatcagtagcggaaccgcaaatcatttcgaaagctcgtttgggtgaaccatggaaatgcttgcacggtgagagaatgcggctgtaattaagaattcaagcctgggtttctgcctactttctttctgggttgctcgtgattaagccttgcagcccgaaggaaaagagaactagagcagaatcaccacaatctccgtcggctggtatgtaggataaatttatttcggtaaggccaatattttattagagattttcattaaattcagtatcatgatcaagatgtgcagattgattgaaataaagtttagggccgcaggagggccggtccacattgaaatcttgtccggggccaatcggttttagtaaaagggaggcattttatttaagctcatgtggttagtccataaatggcatagttctttacaagccgtctgctagagttattgaaatagcggtagatttgaagagatggagaggaagtgttgttatggcctaaagagagcaataatcatgggggaaaaggcttattgcaggagaagatacgtagcttctagaacgttctacagaccagataggcaaagttctgcttgccacttgacaggggaatttactttctcttcactgcgaccaagtgaacacaaccacggatcgagttgtagcctaccattctgtcgccaaagtctgctgttattccaaatactcgcccgccccagtacctcctaggcaacaaagtcccgttccatcggacactgatggcaaaatctttgggcttgtggatcgtgtctggacctttgcaattctttccaatttctctccgggccacaattagaacctccttgatctactgtcccctgggtcgtcgctgagatctgtatcgcagaaccctacctgcatctgtctgaattcacgcgtggtgtttgattggccggtcgggtgcttttcgtctccagggtctcgtcagtgtaatagtagcgttgcaatcttgcgagggggtggcgatctcgagaacctagctcgtgggcctttactaacagcggccaactttaggcttatagatcgtgtctggacctttgcaattgtttccattttctctccacaaatagaacctccctgatctactatcccgtgggtctccgctaagatctgtatcgcagaaccctacctgtgtctatctaaattctcgcgtggtgtttgattagcccgtcgggtgctatttgtctccagggtctcatcagtgtgatagtagcgttacaatcttgcgagggggtggcgatcacaagagcctagctcgtgggccttagttgtatcagttcacatggttatcctagaaactagacccagtttcttgtctgagcttttcaaaggtctgggccctttgggaagccaggagatgcgaccccggacaaaatctcggagggaagtgaggttgcgaagaggataaccgaccctttggcatagatactggaggagaatagagagaaggagtcagcccatgatgcgacacatgaatctcaagataatacgaggcacccatctacataccccgtgaatatttgaagagccctataccggcctaggcatccatcgaccaggatggaggtcggtagcgggagaatattcaccagcacggtgaacgccagattcaccatagtcgctcgagatttgcctagacccattgctcccgggactaagtcattcggtctattctgcagatagttttctggggttgtgtttcgtcagcggaggcagtgcccatggcgctgagacttggagagcatatactgacgaaaaagagtttgcgttccatagtatgagaatcgcgcggccattcctatagtggccgccaaccagactcgcatgggaagaggctctgacacatgcgtaagttacaaatctcgtcgtcggacgccagactgccccctggagcgggggccgtaaccccagactcaattttaacttcaacctttcctacggctcatccatggcggggtttcttttgttttggaaaccctggacgtgagtttgtttcagggattaaggagattggaaatccgaatataggcaagagagcaagatcggtgctagctcgatgaaggtttatcggcatgatatcggagtcgaagccggagttcggagtattgacacatcatcgatgccgagaaagctccgtaaaatgacgaggagagatttaacttccagacactctgactggtatccatttcaaggagaggaaagctgtaacgtatcagcaccaaatcccagcgacaatgcctcatgaagtgtgtatattgattgatgacactcaaaatggtagtgtaaactcttctcccgatgagccactagaactctgtgcctgacatttcacagtccacgtggagattgtagctaccagtcttgagccgctgcaaaggggagacataaatgagtgcagtgtgctaacggctttggtgcagcctttgagacgggaggtaatcgataaaatccgaggcttgtttccaattacccgatcaatgctggtgatggatgccggctcggacacacccgtcaaggccacactggacccagccaatattagctccatctgcacatgtgtgggcgatcaaaaaggccagcaaaccgtcctttttatcatcgccaaccgagaagggtatgtggttcgcagtgacctattccaggatcgactgcgcggttgcccagggatccagaaggtggtcagcctcgtcagcccccggcaattcgtcggttttcttccagccacggcccatggtttggcaaaactcgtcgggttggccgtttgctgcatcctggccgatggtatggacgcagcctcctattgacagctgtcagatcacatgcaattgcggctgcgagagaggctctcattgcagtgacagtcaccggcgacaattcccctacacaggcttgccgtggtcggtgaggtccgcccggctcatctctcttcgcgattcttccaggccgctcgagccttgggggtcgagttagtagccctagggccccgcggccattggctacaggatccagaatcgcggaacgacccagaccgagaagtctttattgaattggatctgacggtggatcctggccttccgcatcggattgtgactactattcaagactacgctggcgaaatcgatggactaagtacagtgactgaatatcttcttatacctgtcgcgcaagccgccgagcgactgggtctccccacctcaccatccatgtcgtttagcaagtccgtcaataagtaccagacgcgcttagaggacagcccgagctcctgccgtctggtctcgggtctggatgcttttcaatctcagctagcatatgaggaggaaggaatacttcctccgggcccgccgtggattgtcaagccctgcaatggctggcattgtctaggggccaccaaggtagccacgaaggaggggctagtggcggctgtggagagagtcgccaaatatgccgcctacagccgagatggaccaaatgcagaagatcctcaatggcagaccaacgtgttgattgaggagtactgcgatggactggaagtcgactgtaatttcgtcctatgggacggtcagatcctcttcttcgaggtgattggtaactttccgtgtgccggtgacaccgtggcagagggcatgcaaaccacggagaatttcaaagaaacacagctagtgttttcctcggctctgccaccatcggagctgtacacgctgaaatcctctctttacgacgctattacgcgtctgggcttccgctccggggtcttccatgtcgaggctcgggggggggattcgagtaatcggtaccgagccgcggaagacgacgagacgctggacttgcgtcccagaccgaagcctgcggcacgccgtgcgacagtcttcctgattgagaccaacgccagacctccaggctatgtggatacctgcgccagttactatgcaaatggggttgatctgtttgcgctccaaatcctgatcgcactcggagacgaatcaggtcacgagccttgtcccagccattccattctcgtccccacgttgtggtctcagcgatccaagcaacaaaggccgggattatcgcgtcggaagacccttggaaagatattgtccagaagaatcccacgttgatgcgcagtgtggtgcatcatgtcatgagttttggcgagggtcatcggatccagaatccgcggttagacactacaccatggctttcagcgtttactacatactcactaaagaatcgtgcggacgcattgagattatgttcacaggttaagagagagtctgagtgtgaaattgtttaggtagactgagccttgcttatttgcgcccttccattgcgaaccctccaaagtaaaacaaagttcttcgaaagtcttaaatcttctttaacgaggtcatcttcgtttctttcaacactgcatttgaccaaaagatgccccaaaatctgtattctggagcagttgaatcccatccatatccaaggaaaaaaagcctatcgaagtcgacgtcgaagttgcgctcagaatctctataaggcgcgggaatcttcaaccgcggctccaggatctcatctagaatacgagtgaaaacagctgcagtccggttaaagtaagtagagctttcctgttcaggacgggccgtgagctccagatgcgagatgaacacactcaggttgcgaatgagagacgcttgggatcccgagtagagcatcggccggcctgtctgggcctgtttttgcaatgctcgaattaatacgctggcgcctggaatcccataaagaagaagctagccagactcgtacgttagtgtaagtaaatatccacgggtttgaaagagacgctcactatccaggtgaggtcgcgttgaatggcaaccgattgctcccactgtcggcccaagatcaagacggtggagagtatcgttgcactcagtcaaggtgggaggcacccgtttctcctgagtccttgctcaaaaggctctggaccagtaactcattatataggtaggccaagtaagagatgagaagcatcaatttcacactggcaggcagatctgttccccagcactctagtgtgtaatgaagatgctcgggcagcgaaatccaggcttcattgtagcgacgagatacagtcctaacaggcagtcgatgagtatgacaacacaaccgcttgtgctcggacatcggtagtaaacttacatcaatagatcggtccgttccgggcttgacttctgcaaagaaagctccgagttttcttctcgaaatgtgccgacgatgaatcacaatcgtatccaggtcgctctttggtaagcctttcccatattccacccctggggatccagggaggtctgagcagcatccagaatctcggggtctcctgttagtacatgatcgccaatgtcgagcgggagacaacaatctgagtgtcgccatgaaatttgtggcggacgtccaagaaaggtcgcaatacctttatcgaattgataggcggccgcgaagagccttcgtcgagattctagaatgaagagcggcagtgccgtcgagctagtcgtgtctctatgcacgcccaattcaaatatattcgtcgcgaactcaccaagacgctgccaggtgatcgaacctagaataagctccccgtcagtggtgactgcctttgagcggaatccgaaaatgggacccactggaatcactgaacaataaactcgtccgcaactcttacttttccgccctccagccataatggaaagttactcttgaccagaatagccattccctacgtttaacccatagcatgttcgcgttcccgctcgtcaaagatacgggggcgttactaaatgcgcgctggcattggacgacgcgcgtgaactgctggatctgttgctcggtggccgatgggccatgcggtgtcctacgaccactacgattgaccggtgcgacccagcaatgccggtcacgccagtgcttacgtatagtcctagctttcctagcgataaatcgataatactgggtcttctcacataaaatgtaatctagatgaatcggtaaattggcgatcgggctcgttaccgcggtcggagcttgccattcgttacattgttccgtacggtcccaacgttggatgatatcgccgattcggccggcgtatgtaaatgacctttcgtggttttgcattagaagccttgaacccgattgggtcccagacataaatcgacgttgtggcccggcccatctgcggccactaaagtctaactatttcaagcactttacgcatcttaaccaagacgctcaaaataggaaatctttctagatttccgctcttttacggtatcctttatattaataggccgagattgcggtgattttgccccgattctcgtgacttttctcgtgagctactatagaggcttaatcacgagcaaccaagaaagcaagtggggcagaagcctgtagataaactttcgattatgttcgagcccaaaaccttcataacaaccgcattcttttccgatcaggcggttccatagctcatcgaaactcatttgcgaaagatttagaggttaactactaatcggcggaatcatagttccccggtatttgtgaagttaacttttccctacaacttaagtcaaagggtcctatcattattatttggcaggggaaaactatgcatcacgccaaacattggtagtgcatgcatcgaaaatcaactgcaagcctcaaccttaacactagagagaacttttcttccgacccacccatccaattctgtctaattcccccgccgccttcaccattagcaatactgtacgcatctaattcgcgttccctaaccaaatctcgttttgtttcgttttatacgcgttattcttgctacttgtttgcgatccttcagaatgtctgacttacagttgagagaggattcgaaccaccgtggatcgcgtcccaatccaccacctccgactggcccgcaacaccctccccaacctccgtccccagggcttcaaaccgcttaacgaccccttcccgatcacccttacccatctcctgaatcaccttaatcttgacctgcaaacgcccaactcgaatctcaataccgataatattcttcttcagcatttcaacttaagagtctggcgcctcgggccccgtcctcccctctcttcccttcggggttagactccagtcacctcgatgcctccttgtggtgccaggaggatggcatcaatctttctctttctgtagggcaacaccgaacaaggccgatcaattccaggcaaaaagagtcggaaggtccagggtcttcggagtatcggcgttcgaccccgccgaaaacgccagtctggaatgcgacctggctagtcatcgaccctacgagaagacatagagagtggacatatagtacacagtttgttttacattcagacaaggagaaagagactggaacgaaaagaaatccggttgttgcttagcgctaaaagatagtgtaacttcgaccttttcgaacctttcactcgaaatctcccaagctaaaaaaacaccccatctaactagaatctcagattgatatcagcgccgcattcgaccaacgcctcgaccatcgaagcgtgcccgttttgaactgcaaggtgcatggcggtcagcccgtgtccatccgccatggacaccgtcgccgccgcaccatgcatgagcaacaagcgtcctacccttgcgtatcccagagcggcagccacgtgaagaggcgtgcgtccgtcgttatcctgagcttttacgtctgcaacatgagccagcaacaccgaaactatatcttcgctattcataatcacgccctgatgcaacaaagttcggccgaaagcctgcccattgcatgccctagcgttcgattcaatctccgatgacggggagaggaggttcggatcaagcggaaacgacgtgtctgaaggagggacggcctttgttcacagattggtttttcgtaaattcagaagacgagggaagagagagacaagggaagggtaattaccactgaaaagtgctcctcgactcgagagctcactgttgaagagtctccatcgtgtactgttgacggggaactgtataccctcttggcatatcctgccgagggaaggaaccggtgagagagaggatcattaggttccgtggacggtgggtctatcggttgatcgacttcgacttctggaaaaaggcttggtaatatcgattgagggtgcatacaagggtttacaccggctgatggcaatgggcaaaatttttgttggccggaccgtaggtctgccaaatgtgttgaggggttggtgtcatttcctgggtgttgaagactttgtcgcagccgatcatacttttccaattgctgcttgacagactcacctgcagatcccagatgaggtttgctaacgaggtgaaatggagccaagagcgaaaataacaggagaactcacgatgtttacgctgtgcctgccgattgcgttcccgtcgctggtcttccttggacatttgaacaaggacccgcctcgctggacggatcggtgtttgagggtatccagacccaggaagatcagggaatttggatgagggcatcgccattatcactcgagtggtggcttctttattcgaatatgaccggaatgattcctatgctgtccggcgcggatggccgagcaatgacgagaacaaacagtggttagcactttcctgggcttaagtcgggagaaacctgttcttagaaggattttatggtatgtcctaacagccgagggccttgtgctgcggccgccttgctagattctccaggcgtggtgctattggagcatctaatacccacttcattaacaagcaccgttacttccactcgacgagatgaattctttccaaggagatatgggtgggagcctcggtgtacgaagccaaagtacaggaaccatcggtaaatggtacctttttttacccgggtaggcatggactatcgccccgttgtccgatccgcgcagaggttagtaccccatccaccaacagccctacgatggaaaatgcaaaatctgaccgatctggtgtgatacgacgtcacaaaccaggaactgatgaggggtcaacatcttagctaaccaattatagactagccccatctttcacgtgcgggctattgggggcgggcaattatgccggtgcaagtgcgacgtgctttttgttaattgcccttgcggccgcagcttttcgccatccgaaggccagaatcgtaagtcacgctttgaccaagaatttgtctcgtgaatatttactgtgttactgtgtcttggtcctagagcatagacaaaatataatgttacatttgatgtgaggttagtcatgttactctccaacatctggccccataatgcgggtccccaattgtagttggtgccccgcgcgatcaccctttaggttcaccatgggtcggagacccaaatactcacgcaatattccctagtatggtcacacgcatttcaacggcatatccttgcatcctctgagacaaggctagaaccaccttcggataggaaagttgcgaaaacctgttcgcgccagtctcatctgtctaccattttcgatatcaacatcagcccatctcctaacactcggagaggcctacctacctagatacctaggaactacatcccgtagttcgaaactaccaatgaacaactacaaccctgccagtttatctgtctgataaatgttcgaataactatcgcgctcggattttcttttggcaattgcgcccatagcgggtaacaaaatctcgggttcagtttagttctaccaatcaagaagctcaattctcaaccgcacgcgatgtaaccggaccctggcttagacctgaattctttccttggtaattatcttctccaggaatccttgacttgctcgtgcttcggttgaggcgttcctggcccccagaaaaatacacaatggatggatgacgtcatttaccctaacccctcgcagaataacgtgatatgtgagaatacaatggacttttgatcctcacgccttgtttctcggtccatacttggaaagatgctaattcatgttgagatacacagtaaataatccttatctactgtataaatagatctttatcaattttggaacgaccgctttaggtttaatactgtatacactgtataaggaactcctatccaccgctagctcagcgccccccagtcttctcatcactaatatccaacagctattagagtctctgcggaatacggatatttcatcccaacctaacgctactttttattcgcgatatgatagaaagcctgtcactattgcacccacgtcttgaaaggctgacacggctggatataggaacggaactaattcaataatctgcaaaaaaagccctaggtacatatatttgccttggctcgtatgacaaaaaaaggagcataaatgcttcaaaccttgataaactggaacgaaacagggtttccgttcagaggcttgcagtccgttccggtctggtcttgatcaggattgaaggtgtcgacctcttggccggcggggcaatcagccgcaccatagaaaacaagcatgccgtcagcatctagagccaaaagctggagtccagcaccgccgttgccgagaccattgtggcaatcttcgtcatcaccagagtaagggatagcctcgccggtacattgaccattctgatagactgcgatgcggtaatcatttccagctcgagtattcaaggcattggtgttgttgcgctgttcgacgttcggaatagacgctccttgcaccagggcggcgcttaggaagaagccgagggctaggttctggaatgatcccgagtacatcctggtttgcagatttgactgacgataaacggcactccaagagggtgacgctggttgatatgggcgtaagcggttctgagacgttgagaccactgatcggagttgtcgagatcgagactttggaaatcctcgatacgcacacgaaaatcgtgatttgaatcaggtactggggtcaagtacaagatgtcgtattctgtgtcgtttcgatgctcgaggatatcttgttggatacgatcaacaaaccggacgtcgagcgttccagcgatctgcctttgcattttgtgtgagacggaaattgaataaattgaatatgaagacaggtagtcgaaagattccgagagtagatgcaacggggatggggcaaccgtttaatgtttgatgctaggggcggtggtggcaaatgtgacgataaggcataattccaggaaacttacctacttgctcagagtatgattgaccttaatgaacatgaatgcgccaacaagaccatgaacattgacgctcttatacccgaacatgtcgttccttcgatggcagaccgactgcacagtcatacgctagtcagcatgaagattaaagcagacattgtacattcctgcttgaatgcccagcttgcaataggctgctaatccgaagcactagaccacagcgggacggtgttcaccggtacactcgttatgatcaggttataaacgacgtcgatgactgtgcatgataatgacatcataacaagttgttccacagcaaagctctcgatcattgcgtggtccgcaaattcccctctgtattcctgataacatcattctttgacggccttgagtcgaggacattggagttgcctagaagctattatcggttttactcaggggaccggtggggcaactcagcctcgtgccccgatgtaaagtctaaccaagctgagatgaccacccgggggaggagggggggcgcggcgggcgcggagagagcacggttcttggcccgtgactggaccccgtaatggaactgcgcagtacggttggcgtaataacgtaattggccaactttcataggcttgagcgagcctttcatgccaaatctagttagtcaactggagagacttcctatgtagcggaaatcctctgctgagtgggtctgatcagggcggatcatggtttctctttcccagagcataggatactgcacgtgatctggtgacagatctgtcggttggctctcggtggcccactgtgttcccggtgggtcgccatcgattggtgacgggtaggtccgtaataaccagctcaacggttggcggtccaatattgattttaacgaccgctattcaccccgttttactgtcggcatttgccgtagacctataatactaggttggatttaatcttatcgatgcctagaggttggtggtcctaagctgcccggatcccgggcagcccgggatccgggtcaacgcgctgacctcccacgagccccgactcatcgtaccaatcatcatcggagcagcccgcatgtttcaacctttcaagtaagagaattgtaactacttataatggattttagcaacttggagcatattgctgtccgtgcgttgctctaagaataacccgtaaaggtaccgggctccctcttcgttttccgtcttcgaaattgcttgatgttctactatgccacctaagagtctacaactttattgacacttatttggtcacggaactcaaggacctggcatttaagaagttcacagcggttgtgataaacttaggaaagccaaaaaatctggataagcagctcgcggttattgattgtttatcgttagcatttccgaagtcgtccctccacgataagcttcctagatagctaggtcagtacgctgcttagcgcctagacaatttacgtctttagaccaagtttcataaattgcttcaggtatttctatcactaagctatcgtataatagacactttgaacccagctaataaggctccttagaatatcaaatgccctaaatactatatccctcctacgatactcgcacttgttttaaggggaaccactactaagataagggaaagagggagagtagaggagggcattacaacccttattatttcccgcgttttcttttatctactttttggactagcccgaatagctctaggatatatatataatgatttggtgaatacacagaagccgctataagtaacttaactcgtctaccgtatttataccttatagcaaatcctttatcttccatttatccctacctagctatcatccgatattagatagcttgattaccctatctactctcaccaaggagaaaactcgttccgtctcgagcgctttataaggctcggatctataaaataaatgacttcacggtatctaggtttctagagcggagtttaaccatagtgtagagcagtgcttaatacaatatagacgactcgatactataagtctgcccaccaattgcggtttttatatcagctgttagatatccaggactgactagagcgtgtagaatccacgctggctggaaagcctcgtcgaaaccgtacgtaagatctgcgtcttcgccgtctgacttatcgacttggaggaactgtttggccttttccaaaagtaaagacactactttctgtcccagcctttccgacgtagttcaagcgctgtaacatgaagcttttcaatgaagaaaagagggccatgatcaagctcgttcccccatacagtagttcctctctgcactggatggtccttgtacttggccttgactgctcccgatcgatcaaagatatggaaggccacatcgcacgtttcctcgttgggctcttccatcctttcccagaattcagagcgtatatcctctcgataaatataccgggctagagcgttggcgacagtgataccatcgcaagtgcatttagcgacaaagttttttatccacttgaaatcgtccattccctcatctgtcaaaaagagccgaatctttagagttcgtgccttattaccggagatggtgtactcgtgctcttcaatgtcctgttcacgatccaaacattcgctctcatcttcgctccaccattcttcttcctcggagttatcgaatccatggtactcaagagtcatcttctgtcaattcatcgtatctggtttctatccctgattgtcaaagcaatatcagtatagctcacatctcttatgtgttagtgggatgggaaggtgagcgcactgagggatcctcggtccctttccattttctccccagtattttccattcttcttatcaaccttggtccctggcctaattttggggcgagatttatgaggtaggagaagaaaggcaggcgggcggcgagacaaaaagtgggatcagccaacaagggagggaatcttctacagttgtacttagtaacgcggtcgtaaaaggtgacttgaccatggattccaaactcatgtcgaaagacttcatcatctcgcaacgccttgataaccatttcaacaaaattatccaccgtgtctcgctcaaaatttcgaagggacgcttccgaataaatcggcctgttctggatattcgtaacgacataatctatttgggtatcagaagggaagagggggcgcgaggtaaaggcagccgtgcggtcgaatttcctccagacttgctcctggagctgagggaaatcaagccaatggactatgcgcttggggtaaagtctgttcactgggtcggtcgcatcgccctgagtcgtgacggtcgcatccgtctcaactcggatcgcttgagatagagtgtttggttggagtcgccgttcagcctctccctggaggcgctctgcttcttctcgcgcctttctctcttttcctagcgcctgtctctcctcctcaagttgacgtcgtagctccgcgattgtttcttccatcgcttgttgaaatcactatacagcagataatcgactgatgcaaatggaagtcaatatagtaggggttcgctgtctggcggcggggagtggcccgtcagggcggaatgcgtccagatgtttaccagcttactcacccccttggctcgagtcgattcatgcctcaggcacggatgacatcaacatgcttttggtctttcggtaggctgacgctcagaggtccttttgtttcgtcgtatagagtactagtgaaagttctcccgtctcgtccgagggctcggaatggagaggaggtggttcttgcaggttgaaatcatttcttgccagagactgggggtgcgagggtattatggaatgcacggatctgcgctttaggtggggaaggggctctcaactagccaatttttttagtcctgctcggatatgggcttcgtccccactactacggaggtgaacccgatcgctagaacctcggctccatcttcacctagcaccattcggaagcccaacagtcagcggccaacaacgaccgccacccagcttaataacgcgcggaaggtcagacaatcacccattattcgggcgcagcgcaaacgcagcactttggctaccatttcggaggaattctacaatagccttacccaggggatcaactccacaaagccgcaaaatcaggatatccgctccctctaggtcagcagcaataagggttctggctaggactcggtgtcccccgagccattatcagaaccgatgatgccccctcctactcttcctccccctcggatctctcctgtaattgctccccatgttaaagattcttcgcctagcactgcggccacccctgcgcttttgatacgcatacagcggaatcaacattcgcaagaccccgtaggccagttccgcggtcaagcacagctcgcggggcctgagtgcccagatggagtaatggaagatataccacttatagaggcggccgctcctttgcagctgcgtccgaaacccaaccgtatcgataccgctgtacggaatccgtcggtctctacaaatgggacacctttcttggatccttcgtctgcgacgtacgataaacctcccagtgcctctctagctcctagtccccgcacagatgcaataccgccttccagtgggccggttcctcgaaaatcagaatccagaactgcgtctaatcggaaacgagccagtatgagttccactcaggctagtccacagttacggcccaagattagtcccagcatccagccccttataaaaggcagcgatggtgagtcttgaatccgaattgaattccatggctgttgtactaactatatactagacatgtcataggatatgctttacctagcatcgaaatctaactatcaacacattctcaatggcactctgccatcgggcgtgagctgcccagaggccctagcagagaaatctgagctcaaagcggacgaatcacaagctcgcatagcagggacgccggaatcgaatcaacaatacgctcaagaaggttgagcttctcgttccgcaggagtttatcgatgaccgcaatgctaaggaagctgcagaagcctgtagaaaggtcaacgagaaggaaaaagagaaagaaaaggctaaccaggccatcagcaaggccacccctgtggagatagccattgattacatcaaggccccgaaaaaaaacttagacacaaccactgctaagttggctgccgtcgaggccaagttttcgggcgagccctctacggagagctcaacctcaacttccgcttaacctgaggagactccgaaaggtgtcgccaactctgaaacgaagagttcggcgtgatcggactatattaccttaataagaccagatcttctgcttgcccgcatagtgatgcaatctatgcaacggtggaagatcgaaaaacgggatattccctttccggggtggaggtttcgcgcaattgtgttatggatccatgatctaatggggttttctttctgtttatttttataacgtgatttgatagcgccggtgtttgaactacgagggtggctcatttttgcttgtactagttctatttttactatgtctacctacttgataaccactgccagttcttcaattttcctttcttatcttcatcttagatcgattttagatgcatgaccctagtatttgcttatcatcatgttccatttaagatcgtgcccatgaagtcaattgactgtatgcggaatcagaatcgggagtttgcgtctgctccgtactcaattaataacctgacaaaaggagctttttggttctgcaccgccagatgaataggcgtcaacccatctttatctgtcgaggagatcgtcctatccgccccgtttgacagcagcatattcccagactctacatgaccagcaagggcagcgtagtgtagtggagtctgaccatttctatcttgtgcttgcacatcagcgccgtgtttcagcagggtggaaatcagctttccgttatcaaggagcacggcttgatgaaggagggaactgccagaaagtgactgctttcgaaccgatagagagctttcaactagctctgttcgatcggtgcagttatctgaaggagaagccttaggtagtgttaatagttggtctagcaatttggtggattttaccctcactctctgatgtgtcttgtgcggaccatgaccggttaccgagaacggaagactatacccccacggggtgagctccgatcccatgtcgagctccaaaggaaagtatgcttcgttgtttggaggggatatatgaggttttgcgggtgtgactgtgacttccggaggaatgccgcacgggcttgggagcagatctctcgttgtgagaacatttgggccttcggcgtgagagccgccaacattcaagcttttactttgtttcgtgaccctgagcccttcttgtatgttggcattttgaagaagatattcatcttgtcgcaagcggtgtttgacggattctcctacggaaagacgaaatcgattagttatattttgatatgaataaacgcgtatgtgttaacagaactatacgatgcatagaagagtgacttaattttaggtattctcacggtagttccgctgtgatacgcaatttttcgcgcgccgttgctcttctgtgaggtcccgaaccgatgtgtgaggccctttagtaatttttccacgaggatgatgcatcgtgtttttcgctcagaattgtaaagctgctatggtaaaaactgacttataaaaccccaatgcgatgaatgcgctcgtggtaaaagaaaagggttgcatcctgttattcttctggggcggctgagcaaggtcttagcgaaaagcatgtgctagtcaagttgggagtagttgcttctttttctctagtgccattaatctgcgggaaaatatagatcccctcagagaataaaaagggctaagctgggatttgggttacattgcagggattgagccgtcttgattgctgaaacagtgcccctctactccaacttgagccggacattttcaagacaggtccacaagctgccagttataagatggttattcaagcatcttttagacagtaagtaaacagataagatcgtgttgtctcgaacaaaggtaattcgtagaagactagttgcttggccatcattacacggtttgtgtggcaagtatcataccatattggtcgggtctcacccctggtggataaaattcagtttggctcggggggcgaaaaaggtaccaagagcggataccaatatagttaaggcatgtactttggctccgaggggacaatcaagtgtgcttccgagtggacttgcatcgaccagaatttgtgagaattcgcatgcctgttctgtcatgtcctattgcgataggctcttggtgcctaggctcctatccctccttaaggactcatcgcgttgggtgaatgtaactaaaggtgtcaataaagtgagtactgtactgggtgatgctccaataacacccgctcctggagaatctagcaagggagccacagcaacgaggcgtcagcggccagaatcatacacgtacaattccactaatcaccaaattccccgccttgacccgccgggaaagcgatagccacttgttcccctcatcattgctcggtcatttgcgccgggaagatgatcgttgccgataatgtgcctaggtataaatagtataaatagtataaatggtataacctaccctaacagacaaagattcaggagcagcactggatccgttctggtgataatcgaacaaagggagcctctactagagtgataaccgtgatgcattcgtccaggttcccagaccttccggggtctggatacccacagatgtcgaccttagcgagggagatccctatccaattgtccaagaaagaccaacaacgagaacgcaatcgacaagcacagcgtaagcatcgtgagttcttcttcttttcgacttttcgtgaaagagacctcatcgagaatctctaggtgaatctgtcaagcagcagttggaaaagtttgatcggctacgacaatgtctccaagacctagatagtggccctaaagcctcgaaggatctggcaaacctaccgttagatgaacagcaaaattgcccgtcgccatcggctggtgaaaattcctctatacccgttcaatcgatattaccaagcgtcttaccggaagtcgatgagcccataaactcacagtgcagagacccaattaatatactcactcgcccattcattgcctcaactggatataccaatggattgtgcagtcaactatcaaaatcacacgatggagactcttcgctagcgagctctcgagtcgaggagcactatttaatggtaagcccccttcccttctccctcttttcccacaacttctgatttcactagaaggctgatttgatttaaaaaaaggctttccctccaccagatacatcgttttcgctggacccaaaccactgccctccgctagagttagaatcgaacaccagggcatgcaattggcgggctcccggtcggactttgttgcaccagggcgtgtttatggatagcgaagacatagttttggtgttgctggctcaggttgcagatgtggaagctcgggaccatgacggacggacacctcttcacctggctgccgctctaggacacgcaaggatagggcgtttgttgctcatgcatggtgctgcggcgacgctgtccctggaggatagacatggactgaccgccatgcatcttgcggttcagaacggccatgcgccgatagttgaggatttggtagagttcggcgctgatgtcaatttgcaattctaagtagatggtagtgtgagggattcggagtgggaagttcaaaaacagtcgaagttgaatgataatttagcatcgagcgacaatcaggtttctttccatcttgcctctgatgtatcgcccggtcacaaattcctatttccgcagataaactcaagttgctcactatgactcggacgaaagaacttgttgacttgtctcaatatatgtatttctcgctccatatttggatctagttatgtagctgcgcagtcaaggctggtagagtataacaggattcttggggatcagctatccacaatgcattatcgcggttgcttgcctgggttcaggtagatgcagacttaaggagttcttgtaccatgtgtatgtaggttgtattattgatggagttatgtgggtcacgacccagtattacatatagatacaggtctaaccctaatgcatgagtagtgcgtatcagggtgacaggacaataccatcggtacaggggatccaacaggagtctagttataatcgcggattggaagaacgttgatccagtacttcacaacaccgagaatccccttggcattggcacccaccaccttcacatatttggctttgcctttgagaccatcaatacgagcgccctggtagtgaaaacaaaagacattattgattgaaagaaagagggggcgaacagataagcgcatgagttgcataacatcaagaaatgtctccggtttcaaatatacaagtcttgtccctgctaataccgtgacaggcattctcggcgtcggaacggaaagcttgcttcctgtgagccttgccgcaaagataaagtgcggtgcgaccatgcccagcctgtgtgtaaacgttgccagaaacggggattcaccggtcggtgtttctaccatcctgcaccgttgaccagcaccagaagacaaccagatagggatggtcaaattcacttgtatgtccgcaattgcccgcagtaggaatatcaactgagcgcaaaaaaatttataggtcaccttcgccttccttgggaaacctgggcaaccccatgtctgactctgaaacgcttgacgctgtggcaccatgcccgtctgttatccagccagcacttcgaactgaacagatgctgccagcagggtacttgggtccgacaagcttcatcgcggggcttgaggagagcgttgatctttttacccatggtgaacaatccaatacagatggacgagagaattcagccatagctccatctcccgcgttagtcaagaggaccgcagaggttcttcgctgcttgcaacatttccctgctattaaaaacctggtccataaatactacagcgtctctcaaaccgctgtcatcccgtcaccatttatcctcaacgcgctggacgagctggaggtcactgttaacggaagcttgtttgggtcagcgtccgatgaacgactgtttacattcagcacattcgtaacacacaatactagcaaggccttgcagatcccacagaatagcgacgggacagtgtttcacaaatattttactggaccttttcttcgcttggagatcattggagttatatgcgctctagcaggccgggccagctacttcgggctagccgacagtacggttggcgataccgagtcaccaacccaattctctcgcaaaatgttggttatatgtgatctcactatacatatatgcaagagtctaacggctttgaatgatctttctctctggcttgtccacgaaaacctcctcttgtcgaagctgcttcggggtgattctagtcagtcatatttactaaccctacacgaatcccaccgctgacgagatgttctacaggttcagtgacatggaaccgcctaggtgaacttgccacgggtatatttgagtttggtgcgcatagggacacccctagcttagtaccgcttttcattcttgaatcccgacggcggctctttgcagcttcctatcagctcgataaaagtattgcgactttccttggacgaccgcctcgcatttcatggaggcactctgattgccttcttcctcttgatatcagcgatgaggatttagctggtcacccccatacactggaggctgcccggcgctctttagatgctaatggatggaatataaaaaaagtctatcagccagcatcttggatacgactacgatttattatcagtacattccgagaagagattctggagctgtcccttcaaaagttaagtccgaatagaacggaaaaattgcggtaggttgaagtcgatgtctgcctggagtcatttttgtctacttgatgctgattattagtactagtgaggtttccagtcgctgccaccaggcttggggtttgttacctgaacatctccaatatacctctagttgttgggagtccgaccttcctataggagtgaagttgatatcgatcatttcttatatcgcctatctttacaatgagttctcaatccagagcctattgtaccaggattctaaaagaacggattctgcgctactagacgtcagctctgaaatcctctccactatattgaccctgggccgacagtgggagcgatctgttgacatcaagggtgacttcacttggatcgtgagtagattttggctacctaatggatctcaacttatcttcttttttaggctcttgtttatgggttttcatgcgccggggttttgatccgagcaatgcaggagcaagctcgaacgggccagccattattgtattctggatctcgatcctccctcattcgcaacctaagcgtctttatctcgcacctagagtccatggccggtccggaacaggcgacatctccattgttcatccgtgcaacgtcggtcttctcgagtattatcgatggaatattggagccgagacgagaagttcccgtcaacagtactaaccccgatactatattgaattctgatattgaaacgcccttcctttttgatcttcaggggatggacttgtttgagactcaagattttcgagttgcctttgatgatatgctttactaaagaaggctgtgagctcctagcaacccatttagagacttttgcaatttcctacaaacagccactttgctctcaaattcattatgttttcttcgcagagtcttcagcgagatgcccttcgcttcactctgacactgtcaggtgatgattaggaccaggagttataaataaactatatataactgtaacctcaacaatttctttattaattctttcatcaatttatctactttgttaccatgccaggcaccataccaagcgatagaaggcaccgagtcccttagacgtggacgtaggaagacgctaccgaaatttcatataggagggatcgatgtagcacaaccctgtaaaactacatatgtacgcagggagagggagagagaacgctgacagaaattggtcaagtcttcttcctaatcaatcttgcactcgaaatcgtccttgacctggtcgcatatgctcaacgtctctgcacgacttgtaagtgagtacactgtgaacgcggcaagccatggcgttgtgctgagctgtgggtcttcgataatgtcgccttttccgaaattcatgataggatccatcacacgggacatgagggttggacttctttccgcaaggtctttccacggatcatcagaggcaaccacaccggacttttctgcttgaatggctgatatcgcgacatgacgacgagcctgatgaggttgcgacaaggcgcgaagcctatattcgtccctaagtgcgatcagaatgtgaagtgcgaacaaatcgaccccatttgtataagcagtagcacatgtgtctacatagcctggcggtctggcgttaatctcaatgagaaacacgctggcatcatgggcggggtggatagggttgggacgcaaatccaggggttccccgtcgcctcctggctggtattgatgactggaattccgcacccgagcctccacgtggaaaacgccggagcggaatccaaggcgcaatatagcttgatgtagagccttctgaagagtagcaacttctgacggtggaagagtagaggggaacacatttagggtctctttgaagttgtcggaatctgcgttaccttcactcgactcagcggtgcaaggaaaattatcgatcacctcaaaaaatatgatctcgccgcgcaataagacaaaattgcagtctacctctggcccgtcgcaatactcttcaatcagaacatcggtctgccatccagagtcttttgagatttccccggttctggaaaatgcggtctgccttgacactttccccacggcttcgatcagtccctgcaaggtagtaaccttatggacgcccagactatgccagccaaagcagggtttgacaatccacggcgggccgggaggaagcgcatttctctcgtttgatgttatttgtgagatgaggccatcgaggctagagaccaaacggcatgagtctggactgagttccgaacgcgtgttgtgcttattgacagatttggcaaaagactcagatggagatgttggcagaccgaggcactctgctgcttgagcgaccggaatgagcaggaattcagtcactgtggtcaatccatggatggggcggttgtagccttggatggcgttactgatgcgacgcgaaagtccgtcgtccgccgtcatgtcgatttcaataaaagcttctctgggggctagctttacagctcctccttttcccagccaatgtccgcgtggccctatagccacaaccttcactccgagggcatgagccgccttgaagaatcgccaagaagcatttatctgacgcacttcgccaaccacggccagtctgcgcatgttgatagactttggggaagtccattgaagtgacagttgctcgatcagctgtgattggatggtattctccagttgggtatatgagtccccatcatcatcgatcaagatacaacacacggctgctctcaggagttgcgagagaccttgttgagggaattgaggccaatggacaaactccatgggttcgaccagccctactaccttatgtattcctgagcagccacggagtcgttcctcaaaaatatcatttcgaatcatgtaccctgcttcattgggtatgatgaatttgagcaatttctgctcgctttgaacatgcgataaaaagcttgagtcggtattcatgcatgcaaatatcgaatcaagcttcgtacgcttcatggcaattgtgatgggaacggagttagtgctcatcactagtagcgactttgctcctgagaccacgacttggcatttttcaatgagctctggaggggcaggctggacaagggcagtaagaatgctgcattttgtaccgctctcgttttgcatatgctgaaagcctatagttgtgatcgtcatgtagactaggaattgttagttatacaggacgaaacaaaaggcgaaaagtacactaccatcccgcacgcgatcaaaaagaatacagaaatccgaagacattgtggttattcccttggacgtgttttttttttcaaataattattcatcttctgcatcaagggcttttgaagttttgttctctgggatctatcaacacccaatgtgacgtcgccacgatatccgaactccgagtttgattccgatcacattttcagcaaatcccaaggtactgtcaggttatgtcatgtcatataatgactgtgcattaataaagtccctgtgccccataattcatttcgtcgttttcttcatgagcgaaaaaccccgtcattgatgaaaaacagagaagctcagtccgtatctatgtcttcaccaactctgcagggtcgcatagccacagaagacgaaattcgcgatttacagcatgtcccagcgcatcttcctaagcgagtctggttggcggcgactattggaatggcggagcggtttgcttattatggaacacagaccctcttccgtcagtatacaactctcaattacctttgatctctctgttaaccaggataaacagaaaactatctccagaacaagccaaccgacttggtacctggggcgatgggactgggaaagtctacagcaaccactgtgaatttagcgttcactgtgttggtaaacatcctaccattgccgacatccgttcttgtagatggagtgttaggccgatatcgatctcttcaaatatttacgtggttagttgatattcttctgctttgcgctctcacccattttaactgactgatcaatgtctcttgtacacctgcagcatctacgcagttggatccacagtcctttttgcgacctcctttccttcggaaatgaagacaggtatctcgactcccggatttgtggttggggcgattctcattgctctcggcctcggaggggtacaagcatccatccagcctttcatcggtatgagctagaaagcagaagcagagtgccttggctgattgacttgcagcggatcaatacaccgaatcagatatgcgaatcagaacaaacaaacaagggcaaaaagtggtggaagatcgcgaactcaccatccaatacatctacaatgtatattactggtaggtaggaaggagagacatatgaaggggtttagctaatggacttcgccggtaggatggtcaatgtcggttcattaggtagtgtcgccactacgttgatggagaaatatattggcttttggtcagcttacttgctggatctttgtgccgtggctatttgcgtgttggtggtccaagtggcgaggccaaaatttggtgcgtttggtggtctatgtcgcaaacgctgacatgtatctaatcgctttcaccaactagtacacccgcctatccaaggctcaaagcttccccttgctgctcgctgcctatggtgcgcagcgaaaggaggattcaaactcgatgccgctctcccggagaaacaattggaggtgcacggccgagtcgttccctgggatgaagagttcatcgcggagcttcggggtgctttgtcggccttcaaaatctggtgagtggtactgagttacaatttggcggtctatgtcggtctactgacatgagtagcattggttggccaattttctgggtttgcatgggcgaggggtcccaggtatcaatctctcaagcgggtcaaatggagacgcacgggatccccaacgatctcatcaaatctgccaacccggtagcctacgtcttatttggagttatagttcagaagcaactatatccgttcttgcagaaacgcaagattgtcttcagcccggtcaatcgcatcacgcttgggtttgccattatggcaattgccatggcatactcggccgttgtccagaatgcgatataccaggccggtccgtgttactcacgtcctcttgcgtgcgacgcatctcagggagggcaaattccaaatcatgtccatgtgctcctacagcttcccacctttgtgataatcgctattgccgaggtattctgctggccaaccggctctgagtatacttattcgcacgcccctaagagcatgaagtcaatattgcaagcgtgctatatcggaacggcaggattaggatatctcttaggcatggcgttgtccccactcgccaaggatcctctgctagtcgtgttgtggtctttggtcgctggaatgatgttcctgacggcctgtgcatttcgtgttgccttccgcaaatattagatgacaatcaggatttggagtcgacagaacggcagcaatagcaagtgcagccaaaaggcatggaaaacatagcatttggttctagcttctgtggatgatagaccctttgggaagcagtcttattagagatagaacatatgtggcaagcttggtcctggcacggtgatggttgagcttggttcagagtgggatgaacagttggcacatgtattgaaccccattttgctgcagtttttgattgcgggcagtctaaataatgaccgacgtgtgtgatattatttttcatctaattaaacggaagcctgaagtaaagatatgcaatctacacctaattcctagactccaggagcagatcctgctctggaggtcgtggatcatccgctgagcgtacttggtggtgcaaccaatagtgctgatagatgaagaccatatcaaaagggatggtcgcattaccaagatcgaaagacccgccgtagactgccggcgataattcattactgcctacggggtgtgcttggtcgttgccagctgtaggcctacattgaatgactcggcgaaagtccaatcagtatatgagaaagtgataggatgcatgtacttgctcaccacgtcaatccattctcgtcaaggtcctataggaataaaaatctggcaacatccgaggcgagcacggcaagataactcccggattctaccaaggtcaatcgacttgcccgttgcgatttagatttgaagttctaaagccacacctatataataggtgactggagatcaagcagcagatcaatgacccatgaaggacgtagacgaaatcgttcgattgaacagccagtatgggctctaggaattacgatacgcgtactatgctcaaacggtactgggcaaaagaagcagccattgaatcccgtatatgcggttagaccggaaaggcattaagctggacgaagacgaatgagaagccgtcggttgaccgtcggcgatggttgtggatcacttgcgggtagaagaaaaaaggccatagtatgagaaagggcatgcaacctgctgacagccatgtctcggaaattgacataagagaaaagtacatttgaacttgtagggagtcaacgtttcggaataaacacggggttcggagtccggagttcggaactcgtcaaacttggtatgcttagctacgtaggtacctaggtataaccaataacggacttaataaaaagccatcagtcacgagtggataatcaagtgactagtgactacatgcgtctcagagagatctacgataagacaaatttggccaaggctgcacagtcatttggccattataaaattggtagcttatttggcgcttacctacagaatcatatatcataacttcttcgagttctttgagaagagaatttacgcccatcaaacctttcctggcgcctcaaacttacttgcacttagcagcagactcgaataagatcattttcatcatgctagaaaagccagcattgcagcgattcgaaactttacaacttcacgctgggtacgacactcaggccactagttccaaaactagcttactgatgcgttgaaatatagagcgtttcccgatgctttgaatagctgctcagttcctatttacacgacggcagcatttggattcaacaatgccgagcatggcgtgcgtctcttgaatgttagcgaattcggcaatatctacagccgtattaccaatgtaagaaaatatcaccttcctctacctttaaatcgcagtatcagtctaagccctacctcttatttcagccaactgttagcgttttccaaaatcgcatggcagctcttgaaggtggcgtcgctgcttgtgcagtcgcatcaggctcagccgccgtgtcgatgacactgatggcactggcagggattggtgacaacattgttgcctctttccatgtccatggtggcacattgcatcaattcaaagtgctggctccacaattaggtattgagtctcgatttgtcacctcaaatgacccggaagactttcgatccaagatagatgagaagactaagttcattttcgtggagagcattagcaatccgaaatatgttgttccggatctcgaagcactcgcgaaaattgcccactcaaagggaattcctctcattgtcagtatcctcctattaccctcttcgcaaactcgcaccagactaaacgagattccaggtcgataatacatttgggtgtgccggttacttctgccgaccaattgatcacggagcagacattgtgctccattcggcaaccaaatggatctgtggtcatggtacaaccctcggtggagttatcatcgatgcagggacatttgactggggcgctcaagacgacaaattcccgcagttccatgtgaatggtgccgaagagggcagtggcgaactaagtttgtggaatatgtttggctcacgcgcctttgccatccgttgccagttcgaggttctgcgtgacatcggtagttcaatgagccctcaggctgctcagcagcttattatcgggttggaatctctggcggtccggtgtgaccggcacaccagcaataccagggctctagctacttggctcgagcaacagccgtcggttgcttgggtccgatatctggggaatgaggaccatccgagccacaaaaatgcagaaaggtaccttcaccgtgggtatggcggggtcttttcatttggaatcaagggtggcaagcaagccggattcaaattgtgtgatgggcttaagctgatcattaacaccgccaagtatgttccatctgtaaatcccccatctaaggaggctttagctgacaaatatgtacttgatagccttggagactcaaagaccctcgtggtgcatccctggacgactactcatcaacagcttactgatgccgagagacttgatgcgggggtggatgaagaccatatgcgtctttctgtgggcatagagcatattgatgatctgaaagatgacttctgccaagcttttgcgtcgatgaatgagactacaaaggcctctgccaattcagttaaacagaattctcacattgaagagcagaagcgaatggtccggactttatttgggtcccgcgatcctttgcccctttccgtacccagctagatgatagaatggatatttttgaccgaccatggtctgttggatttctcctactttgtagactcaaagcatccgctaaattcaatactctactgttgggattgaggtcatatgaagagaccagggtggagactcaggcaagcacatggtatatagtatgtgagccaattttcctaattaggactgattttacagcattggtgaccaattgtttcatccagcaaatcctccaatagctcgattggtacccaatatcagtagaggttcgttgtggagaaatcccagaggtgctgccggggtttctacactgagcgcacgagtattttatttttatttttatttccatgcttaatgcggcctacacaaattctttgatattgtcaaatacgacgtctgcgctcgaaataacggcaactaacgattttgccctttccttcacatccagggagccagtcgtcgaagcaaatctcatcatgcccgctaccgctaatgccccatttagatcaacaatgcctcgtgtctcttggaacgtatctctgatagcactttgaatctcacatgctttcaccatgatcacatggtccactacatgcggattgactcgtgaaatctccgttgtcaacgttctgtcgaggtgatcgtggctgatgacaggtagattgtcctgtcctgttttcaaagcgtttgggatatgtgtattacattccgcattcggtaaatcaatcggaaacccgtagagcttcgagagctccactgaaggtagaacgtcgacgccgataaccttcacatgtggtgcaaattgtttgactgatagaccaattgcttcgagggcacctcctgctcgggcgctgcagaatatcccttccagctgttggtcgtccttgacttgtctgagaatctctaacgccactgttcctagcccggccagcgtgtaggggtcattcaggggatcgatgtagagagcctgcacgttgaacgcggcggagagtggacctgatggctcatcggaaaggtgttccacgacagatcccatttgttgtagctcgtgcacttcatttgggcacatttctggaccaactaaaataactgctggaatattaaggagacgcgcagaatacgcgattgcacgagcatattgtcctggaagagtccaattggttaggtttaagtcatgcaaagtagcatagatcttcacctttggaaggaatgacaacgcccctccatcgattctcaggtgtgatgtgactcatagagttgtataggccgcgtacatgcgggctgaaacttaattgctgatcctcgcgtttgaggtagagctggaagtccacatgccgactgaggttgtgtgctgggcttaaatctgtgcttctaatcatgtcatgtaccctagacatgactattaattgagcatactatatgtttcattaacatctaagctatagttctggactggcatacatacatctggatttgaacaacacgcgttgtggacttgcgatttctgtagcatggtcgagagcaagacttcacccgggtcaagaagacctcaagtcaagactgagagcgtgacaacaattctttttttaaaaaataaaagaaataaaaaataaaacgagagcatgtaagaagcaatattcccaaactaaattagtcgcgagtatcgaagtgatcctcaagtcaataatggaattagggtccaatacaatcaattattgaagccagtgtaagctagaaaagtccagctagtccgggaaacaggggcgtctcagccgtacttactgtactgcccaatgcccctcggactagctcgatattaactgcacagtcaggtgtggacccattgaatttagatgaaacataacacgtgaagacttggctaattgcaatatgtgcgattttctattgctactccgtacagtacgatattcttcctacctcatgatagctgccggatagcaagtccatacgacaagagatttcagggctattatgtgcagcgggtctcgaggcaaaccctcataatgggatatgcaatgtcacgtcggaacgtgatctttacgtttataaggcgcttttatgtatattaggttaaataaaatatccgctattatacgtggcccatatgctcaattgcaacttcaagaggtggctgtgtagcatcaggattgtttgtggttgcactggcctctttcctcggactgcccgaatgccaggcctcgcgaaggtacgaagatattcctatgccgggtcagatggcgcttttgaaaaatcttgttgacctaccgaggagttttgtgagagcctttacactcctatgggtatcttgcgctcccacacacttgaaggctgcatctggagacacctcttcgtggcgctagagataagtactcgataatcgacttatgattattaaggattctaagaggtgcataaaatctgtttactgccttctctcatggcctgcatgcgcacctcggactctccgtatagaagccgaacggcgtagcttgttcctcttcgctgtttgcgtctattgactgggtggtgatataatcatacatcaaggaaagctgtccagattccatatcaaactttgttgtacacataaacaacacaagatcctggcccctcatttacctgatattctaactagcacttagaaaatccctcatcataactaaatgaaacctaataggtcttcctaggagctctcagaccctccatgccacgacaatatgattggtgagatgagtatagatcctaggagctcgagtgctggtgcccatttgcggggactgtggccgctaatgctgagagtcaaagtatataaaagaaacactgatccctcctagagtgaacgtatccaggtttcaagcattctcctcaagactgctgctcataagttcaagcaaccgtcggcattccgggtctgtcccctcagccagagcaaaagcctaacgagtatgcagatttttttaatgccgcaaagcaaaccgacaacctagtcgatatccaatgtatccatccgacgagagttgcaagaccgtttcctgcatactcctgagctctgagtttgttatatatggccatggcctaatgggaagatgtaagtgactctcactattgtaccagggggagcgcgaaaatttgcagggggcctgtggctgactgaatttagtagcataaatctactgaggttggagtgagaacagatcctagcttgatttctcggtctgattacacgtactaaaacctacttcaattgtacgtgctctttttgtcatttacctggacgcaaatggtgtgcttcctccgattgagccgaaccaacgatagccccttccacgcaggtgagtttgatccgcgacgcctgttcttctccaaatgtaggcatcgacatagaccaatgtccgtgagatacctgagccttccttcaaacatggtctaaattgatacttgtctacggtaaagtagtagtggttcagaaacccaaaaggctccaggttagtataaaaccccagaaagagagagcctgaagatattaagaaatcacatgaaaataaaacccgaacccccccccccccaaggcggcctctcccaaaccctcaacccaccgcctctgctattgagcatgtgtgtaccataatatggctatatattatcggtcacgtcatttcgcctgtatcatcccacctgaattataggcatctttttgctccctggccctaatttgtcggaccatgcttccatgcttcttcccgccatcgttgaacttgagagccttcatccacgagtcaagacatccgagaaaacaggaagagctcttctattggagcgaagactcgccatcttgattcgttaatgtattcaggcttgacatggcaatcaaaaggcccgctgccctctgcatcctagcttcatattgcagactcggaacctgttaagatactcgctagttgtcttattatattgcctatgtttgccaggtcgatactgttggtctacacatgtcaggttcagtaactgttgcagatttgagcctcgtacatatcaggacccaagccgcattatcgaaattatatctgcactacctataggaaggacgagctcgttaggtaccagctggacttcaccttgtaaccctcaaaatgaataaccgaccttcttcgaattactacaatgacggatatttctagaacagccaaatggcagatatatgggcaaggcgcgaaaatatacttccaggtactggattatttcggcaaagacgagaacgttggaaaatgtgaaaagtgcaatcacgacttgagattgggtagtctgaccatttcgcaatcgcttagtcaggctgttctgggttcgtactcggtacaattgctccttgattaccgacgtaagataattaccaaattcctgtacagcccgcacagccacctcttcgagacaaacaagccacagtacctgaaactcctgcaatacctgaaacaggtatggtcttgtatgataccgttatcgtacagtgctgttgcagataccattaggtgttttacgactcgaccgcgactctatcaaaattgttgaagcccaaaattttcttgccgatagtactactaattttggaacatataggttggatctacactatatatggatcaaagaagcagagggagagttatattaggagagatggagcgagctcccaaacaactaacgtattttccatgcgagctgcgcaccctacccaaaacgcgtccatgaattagaactctgttagcttaaccacccaccgtggcaccaattcgctcttgaattcaatagagaaagagggtaggaccttattagttattatcggttctgagagatgcagtatgcgctagtaccggaagaagccaatgaggccattgctcagtacttgagatgtgtatttctgtatagttctatctgcaaatttaaggggctcgtttaagctgattaagcagttgatgccttgggaatcagggagcagtggttgttgaatgaaatagactacactagtaagattcttctccactttgaccgacagttatccaggcttctaagagtcaagaaattagcgctattcgcgaagcagcacgccgttttaaagtgcttagttaaggaacaaactggaagccagagatgtcaggaaccgaaaagtcgcactaaaatgactcacaaaagctcacgatgcttaatgatgttttccgcacctccatcatgttaagtaagttaagtaataccctgagcccaaatacgtacagtgtctccagtcgttacagtacagcgattttcgaaaacagtttacccctcagacacacggtttgtttctcggctcgtacccgaaaactgcgctagtccatatatggctaattcaaaactaaccccagcttagctgtatcgcagtatttaatgtattgggattctgcgtcaaatgagtcgttgttaattaccgtacacgacaatggaatgttctaggaagacagtcgcaggcacaacggcaatctggcgacctggcctgatccatgcccactcgcttcttcctttttctccatagctgttactgtatcgtctacatcaacatacatgtcgaagactccgtagagtactaacttggtaggctaagttggttctcgtttatgctccccatagcacacgtttcctatcgcaactctcattcgtcattgggcttgttgggaaagccagtaccgctcactcatgctgacaggcctccaggctttaatcgtgtgtagatatggacggcagccctatcatgataattacatctctcagccccaagaatacgaaccatgggaacaggattcacaatattctccccctaccccgggatacttccgaagcccatatgctccatcttccaactgcagcccttccccatccaccccacccgagaatgatcgcagctccgcgaggcaacgacctagtacactgcctctgctacaagaatccgaatgggagccagaaaaagcctacgacgaggatccaccaaactgcatccattatttcatagaatggcgagtcacccttaacaagaagaccgttgttaaagacacggaagaagatcttgtattggccccaggcgcctactggaagttgttcctggaagaaaagctacagaccgtcctcctagagaaagtgccccgcgacaaaagggtcagagttgatgacacggcaatcatggtctcaaacagcgaccgttcccagcgtgatctgaacaagcgtttcaacaaaactgaaatagtttgggccccaattgagaaacaactcaggatgtggtcgagtcatttctgccgtggaaaaagactcacgctgagagtctgtttcaattacgtagaggactgcagttacccacccgctggacggaagggtgaaaagagagggaaatcctccgtcacgaagcggatgcttggcgatcgcgatgcccagctggatgctgaagaaagttcatgcggacagcaatctatttggcgccacgtttatgatctgatgaaatgtgactcagccgcatgccacttgggcccttattgctggctagacccgaagggaaagaagcattatcgacttcggacgcaaacgctcagacgtctggtcacctatgccgagaaaggtggtatcctggagacgcacagggacgtcccggatgaaatccgagatgagctctacatggaagaacagcagagggaagaaaaagataagcgcaaaggcagtaatattcttggcagtcaaatgtcacatttgccgatcaacattaatgttcacccccctggagtggccacaacggcttcagctgttgtgacagctgggcaaaaatccgtgagttcgttgaagatccctggtctcaaggacgtggccgtcaaagaatatggtgagtggcttgcatctaatgtatctgatgatactctgaaagctgcatttcgacaagcgtgtggtataaccctgtctgatggctttgagcttgagcacatctacaaagatcaaaatccggaatttttcgtcagcaaaggaatcaaacccggaattgctcggagtttcgtagaaaacattggggattgggtcgagaatgtgaaaaaagttctgcctgttctcgagttggtgtagacaagctgtgggagttgcctgctgttatttggtgtttttctttcccgctcagtttgtatgcaactctggaatatgaagcacaagtacgtcctttttttgttcgagataattttagtgtgaattttgttccggggtcaaattagcggtaggacaaagtgaagcgtggtaaaggcccccatcggatgctagcgatgtgacgttccgtgggcccgggaatcaccctgttttctcgcccaacgagtctgttcgtcaaaagctcgctttcttcccctttcatatgcctcaggccccgttctcgaagttctgaaaagaagtcaaaagcagcgtcgaacgtatcaggatatgcaagctgtgtgccagatgcttctcccataatgatgcattctgagccaacggcgttgtttgatgtggcactccgatcaaatattcgacgcacgggaatttgaaggaagtctcgagtctaggttgagcatgaactagccgcccttgcgattaactggtttcaggtgaacttacaagcttcatggtcgcgactccggacgcagttgtatagaacgctgggccagcatttggattgggtatacgagcaagcactctttttccatcattcatgatcaaacggaagaccttgttatatcctccttcggccagcttcgttatggagatgcagctctctgatcgaacggctttggccgcgaggctttgcagctcagcaaggtaaaaggccttatccctgtccctgagctgcttttctccatctcagaaccatcatccactggtacaacagaagaagtgctcgtgatcaggatttggttgtcatttggtcggagagactcgtgatcgtgcgaacgatgcgaaacggaagagtagtggtcgtagcttgaaaccgagatggtgctgaaaagaagacagacttccgtggttgaaaacaacaaggtgaacagtttctcaaatttggaagagctgaaagtgcacgacgtcccatgacaacgttcattgctacatagtgtccggttgagaacagtcccaaaatcattggcgccaagggctgggtgtagccgcctggacttcttggcgcttactaagtcacatcagccacagctactaattttaattttgaaacagcatgacgattacaaccgtatgtacagggatggatgcatgtgacggacatgaaagggactgcagtggtggtggaatggccttagcacatcatttatttgatgttggtcattatactgaccgctttgaacgttcagcaacaaattgcggggccaagatattgagtcaaaaatgttattcaccaccgacggctgatgatcaaagaccgaagacttcgaccatagtttcaatgttgtctttcgcacaaaagcttctacctcctacagtggggtcccacagtcggaaaccagtataatgtactgtttctacctcccacccatatggtcggaacagaattatactaccttctaaatgcatagaccgtccagcaaaggcaaattctaagtgatgtgtcccaaatctcacctagcgtgttattagggccgtaatacaccctgtcctatggaatgccactgtacctccacgtccctcggtttgcataaattgaatgaaactggtggcaaagaccgcattctcaaacatcaacatagtatcaaacaatatgttggcgcaagcacgcaagtaaatcaacagcagtgcatggcgcccagagatacagctccatggcgatgacaataatagaaaaacacacccaaacatattcacgaataagaacttcccaaccatttttcagatagcgataccagttctgcactttcatggttctaaaagcatccagtatgctaagacagcgtgtcccatttttggctcggcctccaaaactccggtcgaagggtacaacagtttgttcattctcgggtagcatcgatgccgcaactcttacatacatagctcctgttaaaatcgaagccgagtattccgacacaatcgggattgcatgaaagacgatattggcgcatgttgttagtggataaggtattctttcataagcctggttactcagcgcagcgaaaacaacgccgcggaagaaagccaaaagggttgttgcaagatagtgaacgcagttcggcaggactatatccagaaatgcaactggtagtatttcgagccattctcgccagccaggaattctctgccaaatcgtctgttttctgggttttgaaacgacggtgtgaacccaagcagcgtggaggttcgttagagaaagtcccaataacagccttgataagccaaggacagggaatgtggctccgtcttctgcagaaattggtttagatagagccatgatcacaactgtcaaaagcatatatatcatgaactcctcgaggccagtgaaaatgaaccaaaatcctctttcgttgtgcaagtgccgacgagcaaggcttcgttgattggtgacagcattggatgtagtcgagatagtaaaaatattgcccatgatcattatactgccgcatattaaaaagccagtcactatgttgtttggatcactatcgatgactccagcgagcgataggacgaataagccggcgaggccgagaaaaccaccacacagggtaggaaatagttctcggatggagttatgtctcaggctccagaggaactccctggcattctccgattcgtcccttgttgttctaccacttcggccggtaggtggatcctcgatttttccaactacaaacaaaccggtctcttgcgggttttcgtcctctatggaagttggggtttctaggatagccagggccgctatgacgcttccatctgtgtattcgaactgaaagaccatgctttattagtgtcacgctttccccaaaatgaacttagcaggatctgtcaggtctcaccataaagagaaaaagtaaactaaatagtgatgtcgcgaccacaatcgtgggcatctcggtctggaaatccgcgttggagaaccgcacgagacagaacagggcagactgccaccgtgccagggatcctagtggcatcaggccgaacgatcacgaatgagataaacacttgagggaacaggtcgtcgtctacagcctcgctgggaaggtagggatgctcgagttaaaagaggagatgaagactaccacagcccggatgtaagtggtaaatgtggaagaaaaaggtgtggaggggaaaaggagggtgtgggtcaagccacatcgctagatctcccacatcttacgtagacactctatggagatttacagtattttacaaagactcattgagcgctgagatctaatacgctaaaagacacgatacggtcaagcagggattgtttatagggtagcctattatggactagcttggtttcagatacgggccgaggcacaatccatgtgttgggaatctatttcccactttcactgtatccctgcccactctccagtccctaatacccccgcggccctaggtccaaggcattttttttatttttttattcaaccttctcaccgaagtaggtgtcctgcgactcggaaaaatagaatgatccacctccactagtctgtcaatagcacccataatccctaagcgcagccctgtcaacatcgagagttcatttatctatctctcattcctgcttaaaatggcgcgtatccctaatcgatctgcgacctacgaagaagttcgaatttacattgcgcagacccttatatccaagtataatgcaggccatgacttcgcagaagatactgcccgctcgtggcgattagggcggggttctgagctttatgatgcgaaattggaatattttcaagaggtatttgggatggatacgggtctctgtctattccaaagtgtctgtgaggatagagacaatgcttggaagcagtcagttattggagttatttgcttctgtaggttaccactgttcagccaatacgaattatattgatcgctatatgctagggatgactattgtgtccgctgcgttgctcttttggtttcatatcctaccattacttcgcggccaaacaggctgtaagtgacttgtaacagctggtatcctatattatcagtgtgctaataatctctttgcatagcaccttcccaattactcctttttggcttaaccagggcaatctatgcttatctaagccctaggcgcgatgactatatgctagtgagtggtttgtttagtgcctgtattgcgttagttgctgcaacgcgtggctagtgaatgcactggggatctcgagggacaccacaacgcatgttatctccgaatttacacaatacggaccgtgcaataggccagtatttttccacctacactaccgcttaaattagcgatcaagcccggacgtttctagggctagcatccgaggaagaatgcacagccatgcatgaaattaagaaggggcacatgtatcttgatagtaattaggacgagcgaaaccgaacatctggaccgttatagttgttaaagaaaacaaaagagtcgacagattagacagggagcgggattgcatcgaagcgccatgtgacctacatccctggactcacttgtgggtggatgggggttgtacacggtacaagacggattcttacagtgatataatcaagagcgttttgctactgttagccgataccatatcatctggactaggattgttgagaatgtaagcaaagtagattagaatgtttatacttcaggtcggaaattggttaaatctgattatggatatcgtagtatcacggacgaaatgcagccttgatggggagagagctatttagtgaggtctaacttggcattcaagagtgatagatgagtgaagaagcctcttcggggtaaataagatggaaggccactgacacactcatgtgcatggcattctcgtgtaaaaatcaaaggttgaggctctttcgcgccgtataaaatattatgcctattcttgtacattggcggctataccgtatgaagattggcatgaatcaagttggggttcggcaattaacctccaacagtgtggagttaaaactgatttcgaatatgactgtacaacagtgacttcggacaacaaaaatctaactttgctagatgcctatttccatcaaaccccttcgtgcattcaccgataggattccgtgggcgaaaatattcgaggaagccgagaatacgaccaaacggcagcgtctttacccatcccagagtcatgatcagaagaagaactacagattagacaaaggtgcaactctcagcaaaacccaacaggagattgttatctaagcgaataaaggtgccgcgaacgcagaggtgaaaagaagctcagaaggacagtcacaggattctggccaaatgggtcattgatccaaatgatgtggacgcagaaaaggcgtagaaggacttggacgctcaaggccaacaactgagaagtcactctgttcaggaagtctgttggctgtacaagggaatcagaagaaaggtagatgacgacgatgagacgggtttgaatatacgattgatcacttcatgttactgtattttgtcatatgaaggagaattctaacaatctaaatcctcaacgctaaggcctgcatgccgaaaatggcccctagcactgtctttctttgccccaacttgattaatacacctctcaaggaaagtgctgaaatctcggtcgggatcatctgcaaagtagctccaattacgttttatgaatcctttgagctcagagaaaaattcctcaattggattgagatccggcgagtatggaggcaaatagaccactttcacgccagcgtcggcacacatctgtgagattcgttcggagtaatgaaacgatgcattatccattaccaagacagacttcggctcgggccatctcccacaatgccgaaggagttcatcaataaagtcctcgaagacaatggcatccgttgacccacgaaagacgcgagagagcacaagaccgtcttgagcgtaggcgggcaatatttgatagcgctcgtcacgatgaaactgcgacacttgccgcggtgccacaccgagtggtgaccagcctgtccgtcgaaacgaaattcgcttgtcacatccagattcgtcaacataaacaaggtggtatgactcaaactcggagaggttatgaagatatatctcccgtaactcggcgttctgctccttcgctttctgacgagcagtctttctcgaccagccgttagatacgagggcccttctaatgctagaagttgttgctagcatctgtaattcatcccataggaagatagccatctcgtcgaggtacaggcccggtttttccagcagatgatcaaaaagcgcttccaacattagcggcgtgatacttcgtctccgtccgacgcgatttgggggggcatgaacgtttccaaagaggcgcaagtttctgcgtatatttttgattgtctgttcgctacactccgccgcgtcggccattcgataacgggtaagtgactggccttgtatcatatcactaatgaattgccgcttggacggggaaagcctcggtgccatattactagaactgctcgaatgttcaatgtgtgctgagctggatggatgtcaagggtatggaggggcattcaggttggaatgtattgggatttcatgtaatatacagtataataagtaataaagttgtttggaaacaaaggaatattctattattagatgattattaattactccttagatggaagtagttagcgtggttccgggtacgggccgagaaacaaagcgcctgtgtccgaggggtaaactgttttcgaaaatcgctgtacggtgtatatcgtttcgacgaggggtcagcgtaaatgaattacacacacacacacacacacacacacacacaaaattcattaacgcctggcggctaaaccgaaagggcaactatcactgatctatcaatacatgtcctagtgtacatgtgccttatctccttagaacccatacctggttcctttcagtatatgtcatcgcagctgtcaatatcgtagcgggtcctcgtgagttagtaattctgttagtggactgacttgaaggtgcttcttcaagttttcaacatcctatcctcggcagttgaagcgcgtctaccgtctctggcacaaggtggttggtgtgggttagtttgggggaggttgtcattgtgttggtcgacatggttaagcggcgtcaagtcggtccgtggcgattgcgaatcgtattgaggctcgcactgcttccaagttcggcgcccagttctggtcatccgaaggtgattttccgcccaggaagaaagacatgttgcctccgtgggtacaggtatattgcagcattttcgtccagtgcatagtccacttccgacatcaaaagaggaagtgttccacggtctctcttgcttgtccacatacacaggatgaggaagtgcggcaaacttcaataatatcgactgacatcggcaatgggggaatggctgtaaaggaacatgaagcaggcaatgtttttgcttctgtttcggcttcagagggattgaacgattttggcaaatcttaacaaccggcttttggttacagtaacttccatgttttatgtagctttccgttgccaagaatttcaccaaggttggaatatccccagaaaacatgattatgatgatataaaaaagtaatatacgtagctaggtgggcgaattaatgcgaaattgtctttattacctatctcagatgtttttgtggatgatcttggcgtcatagtaataaacagcggattttctagtcgcgcgtgtcaccttgtaattctcactttagcactttgtacttattgtttggaaaggcgcgatcaaataaaaaaccaagtgattattgtttctgctgctctcaggcgatattcaatacgtgaattgggagcaacgatactcgaatgtgcaggtacgttgggggcgtttcatcacacagggcaaatcatgtcacggggatgggggttagagtgcgatcttgattctaccaaaaagtggttaaacaggggggttaagaaggggggttaagcagagcggttaagaagaagggtggttaagaagagtggttaagaagagtggttaagaagagtggttaagaagagtggttaagaagagtggttaagaagagtggttaagaagagtgtgcagatctagcgcagccaaggataatataaatggcaagataaggcccctcatctagctctaacatatggtatcatccgcaacgtgggggcaaggggctcgatatgctgaactccgcatattccgaactccaggactattccggactccaggtctggtccgaaggtgggaatgcgcatcattcccccttcctccgacttgcgccgttttccctctctccggtcatagtagatgtcgaggaacaattctgtccatattgagccctcatgttaaacgacacatggacgcacacagtctcccaaatcctgggctggacttatttcatcctgtggtcgctgtctttctacccgcaagtcctgcacaatcaccgccgccgctcaatggacggcttctctgtcgactttgcggtgcttaacatcctcggtttgaccgcatacacaatttccaatgcctgcttcctcttttcgccggttgtgcgggcccagtatgcccaaaggcatccccagggcgccgaaccgaccgtccaatggaacgattttgtctacgccctccacggagccctggtctgttgcctgattggcagccacttcctctatgcgaggttctggaactttcagtccaagtcacaacgcgtgagtatcttggctttcgtggtcatttgggcctgcgtgggggtggtggccttggccattctgtacgtttgggtttcagcgtcgtgggaatggattgacgtggtaagaaagcatgcggcgatcaaatcactactagcccgatatgtgctgactctcatattcacataaggtttatgtggtcggcatgatcaaggttttcctaaccgccgtcaagtacactccccaggccgcaatgaactacttaaggcagtccacggcagggctttccattgtcgcgattctgcttgatctgacgggtgctgcgctgtcgttgatgcagctggtgctggactcttcgttgcaggcggactggtcgggtaccaccggaaatattgccaaactcctactgggaaacattaccgtcctattcgatctcatctttatcttccagcactttgtgttgtatcaggaacaaccggcggagaggaagctagggctatcagagcatgatccgctcctggatagtagtgacgagccatagatacacacaatcatatggtctgaatttctccctatgtctgcgacatgtatgaaccagcaatgatgcaacttgtattcgaggtccgttcccttatggagctgaaaaggttgggaagaacgaaacataataatccacctataaataaggcagtgcggaatgacctccagcccatgaccagacgctcgtgcatttcgactaatctatacagtgagcagcagcggtagcgaacttagtagtgagtaccacacgagtcgatgaaaagcttaagtgacactatagctccatgtatcacacgcgaagcgttattctgtactaccggacagtgtttgatatatatatatagtcaagcacaggcaggggaaaatatgttcttccctcatttatggtttgttccaacctcttcaaccaccgaactttcaatccagataccctcaaccaccgtatagacaaagcttcttcaaggatcaccacatcccaccacaggcaagccccggtaagcccatcatgtaagggtaggcccgatacctatggagcggtagcgcccatggcagtggagtccttccgccatttcacgggaaaaaaggaagacactaaaaccttcatcaggttaatctctgagcccatcgattagagagcctggaacagtctcgtttgataggtatgtatcgaagtctttgttgatctagtacttgcgaaatgcaacacgaaacgcacaggcagtaatgaacatcagcccggcaactactgatcacatcacgaccagcaaagagtctctcgcaaggggtgatagtgccatgcctaacaagtaaccgagccctgctgtcccgatataacacgcctgcaagatcgacttcatgctttttgaggcgtgggaataggtatactcagagcccgtgggccagcagaacacttccgctagtgcaatgatgatgaaggtgggggagctgccacagcacatgggtgcggtttgggacctgtccgctgtctgaggccccgcacgcaagggggtgcgagtagcagggacccgtacgatagataaaagcctgcaccacggccgagtacgccatggctacggacatgatgacaaagcctagtggaatccggtccactgcgtggaaggcaattctgcgcttctgcaagaatggatacagctgtttctggacgatgggtccgaaaatcacataggctatcgggttcgcggatttgatcagatcgttagggattccgtgggtttccacttgccccgcctgcgagatggatacctgggctccttctcccatacaaacccagaagattggccatccaatgctattggggttagacgagctctacatttcgcaacgcggattccggtggttgggtaggggaaagtagtcaacgcaccagattttaaaagctgacagggcatcccgcagctctgcaataactccttgtcccagcggaccactcgtccatgcgtctcttgttgatattggggcagagcggcgttgagcttgaatccccctcggacagcataccacaagcatcgagcagcacgaggcagcttagagccttggacgggcggatggactggcccaaacatcattaaacctattgacacagctctatgagaaagatttgcaagacgcaccgaatctggatttcgctacctggacgataaacacgcaaaggatgaccgcacagagatccagcagataagccgacgagaacccgatgtgtttttccatcagcgtggtggcgatgctgcccaaggagccgacattgggcatcctagccggccaccgtcattacctgaagtctccccgtctctgcataatgcacatggttacctaccagtagtaaagattatagatatactggattgtgagttcacggtcttccacaacccgttcgccccgattggtgactctgattcacatctcatgctccgtgtactgatccgctgttgtctgatcagcctcaaggtacgtcctccatatagttgcgcataccgatgaatggctgaacggaagcttgaacccctccaagaccgatagcaatgagtaggcacccacgacaatcttcatcctgagattgcaagtatgccaaggcctacgcgcccagggagtagatatttagtaaagacaacataagtcagctgcgagtagaaataaaagtcagcggcgcgagcctagagatgaagggttgactctagtgagaccaaaatgtcatccggccaaccccaggtacagctcagcgtttccgtcgaccacaaagtctacagcccattatttcggcatctgtcgaagcacttcaaccctcattaagaaatggtaaccgtggttaaaatggggacatgtagaatgtaagcgcgttaagcgatttaattgcaaattcgatgatatgtacgaaccatacgtttgcggcgttgctttcttttcaacagttgatgaaagtggttcaccatactcaacgcacaattttaagaggaagtaggccaggtcgagacttgagtctataggccacaaagtctccaaacaccccttcaacgtcgttgaaattacttcaacgcttattaacgagaccgtgactctcactaccaactgcgcaactggttccttggtagagacgtagccgaaaaatataaaaggagcccgattcccagcccaaaaaaattcaggacttcggtcctcacactccggtatgtcatagtatccctctcttgcctgcgggcttgagagtctccgtgaccacggctgtcgctgccacaagcccagtgatgtaagacttgcgctccctcgctgccacgagccccgcgagtgtaaaaaggtgcttcgcaggataggtctgcgtgaacaacaatcctcgcaggggggcgctgcgttaccaagtgaactccgcagggggacgctgtgatgacaagttctccgcagcctaggctctgcgtcaacaactgtgtctcgcaggataggctctgcgtcaacaactgtgtctcgcaggacaggctctgcgtcaacaactgtgtctcgctggataggctctgcgtcatcaactgtgtctcgcaggataggctctgcgatatcaactgtgtctcgcaggataggtctgcgtcaacaacaatcctcgcaggggggcgctgcgttaccaagtgaactccgcagggggacgctgtgacgacaagtgagacccgcaggagaccgctgcgttaacaagttcctctgcaggagaccgctgcattaccaagttctccgcagcctaggtcctgcgtcaacaaagcgcctcgcagggacatctgcgacaacaagagtctccgcagggacatctgcgacaaaaagaccctctagcccgtgcaggcacctcttcgtggtgctagggaccagtattcgagtattcaagtactcgaagaagcaaagacctgcgcaatatcttcatcgtctgttcattattccgaagggtcatcattggatactagagggagccctagttagatcttcgccaattcaacagccaagatcataaactaacaactgaagcgtcttcagtatcaaatgacgtatttcacattcttttcccttggtagcttgtgatccaatagcttcctcgctacaataggaattggcatctttcattcagatgtaggcaaacagagatgagtgttgatgtgagtgttgatgtgagtgttgatgtgtgttgaaatatcccggttgctgagataataatgaggctgggatcacgtgcatacatatatacctgttcaccagcctacttgtatcttagacaacatgcaacaataacacacaatcaactcccattcataatatgaacactgaggcatcacttatcaatcaacaatgtgagtgttgatgtgagtgttgatgtgagtgttgatgtgagtgttgatgtgagtgttgatgtgagtgttgatgtgagtgttgatgtgagtgttgatggtgagtgttgatggtgagtgttgatgtgagtgttgatggtgagtgttgatggtgagtgttgatgtgagtgttgatggtgagtgttgatgtgagtgttgatgtgagtgttgatggtgagtgttgatggtgagtgttgatgtgagtgttgatggtgagtgttgatggtgagtgttgatggtgagtgttgatggtgagtgttgatggtgagtgttgatggtgagtgttgatggtgagtgttgatggtgagtgttgatggtgagtgttgatgtgtgtgtgttgatgtgtgtgtgattgagcgtggtggtgaatggtcgggcggtgaaggaggtggtcaccgtctagaccttgccatcggtccatgccaccctcagattatgtaagattcctgaatagggggttcaactccaacttctggattaatcggttatttacgtctatcactgtcacccaccgccataaccactggtatagtaggtaatcgatcctaataacggtgtatcctgttgtataatttattatatatgttgcttttatgataaatttattagtgagactagtagacagtatgatgtgagtggatttgtaggttcaaccttttttgtggtcatatatatatatttacacacatggtactcgcatcactatttctatttattttagttcgcactcccaagtttcattcagactagactcaacagtccgctgctttgacaagcttggttcaatccaactcgtccattatatatccttccacccaactaatccgaacacatagtattgtgggacctgtacgtggctaaaatattgtaaagtaaatacgtgcgtcaagggcttgttaacaagcgacccatgggccaaccgccaaccaacgccatgcccgcccatagacaggtggaagtaactcattgcgaatccataggcctcgtgggccgagtcgaggtcgatcaatatccccagacgtagcaaggaggttttcttgccatctcatccacatgatagatgtatcaatttattgattctatctcgtaagccatctctagtgccattctgatcactcggtgaatttgcatacagcccctacttcgattaagctggtcgaatgcaaaccccagactgccctccgttggttcaactatgtataggcaatacatacgctcaagatcagacctaccaggcatagaagcatttataaggaaccgctcgaaataccattttgttggctcaactaaacatcgtgatgcgatagactctgccttcttattcaaagtcatcgcttcagtcggcgattgcaagtcacttaagcctactctactgtaggatggctatatcctagaaccatcccgagtgtgaaagtggattcgcaacaaagaaaaccaaccaagaatatccgatcggctcctacattcgggagtcgccgcaacattgtaagtaatccccccgttagtaactacaattcatatcgccagccgtaccccatgtatcaatatccagtactgcgtccaaaccgccggtcgttgctttctggggcgtagtacccgggttcatgcgatcaagcttgctctgctgccgatagaacgcagcaggatggctctgggtggtgttattacagactaaaactcatcttcataaaggatctgcttgaacaatgatctgtcaaatatcgtccagggcgtggtgagtttgacaaatatatacttaatgctgaaaggatgccgacgctggtggacagaatccgacgaggcccctggcaggagctgcttacgcgataggttagaaaacgacatcaatagacagagacgcgcggccagcttagtgacctgcagtttcagtgacatccaaagcatatacgactttctggatagttgctgggctttgatagagaaatgtgtgcttgggatccaaatacaccaagcacctgttccaaggagacatttctgactccgacttgatgtagctccgtatatttccgcttggttcatttccactcgttcgtatgtgtcgaacgcctgagcaacacggggtacgaggtgggacagtatcggacggtctttttggctctttagttggctcggctgtgcctcggtataaacggccttatcttctcggttcgtagctggtaccgaaattagcctgtaggatagaaacgaagggagttttgcctcaccttctccttgcacgcggatttggactaacaacatggccaacggcgaaggtaggaatcccctgtcattatgcaagacgagacatcggcatttctcggcgcctgccagataatcaggcttgaaaagatgccatccgagaacgtggggccacccattggacgccactaatccaattcaggagggctattctttcaccgtgttcgaatgccgaaagacacacggtggtataagccattgggatttcgcgtatgtatcgcgtagacgcatcagcacatggcctgaggtacagagtcgactgagagagaagggcgaaggtaaaggcgatcagaactttacattggctcatcatcgatgccaccaatggtcatgtcggggtgatagagcgtgggatcacatcggtatcggggagcccgagcagacaatgcacttgcgcgcttcgactcgagtaacgggaacatgagggtaccccctatcgtacgatccgagtcagcgaggcttgaaccactaggacgagtggttatgacttaccagttcataaagatcgcagaatgtttgcttgcaacgagacgatcaattagatggtgatcatattatattacctaaaagatcaattataatcgtcttcatcgatgtggtcaccattcatgccatgttgacatgatgttgtacccagaccgtcgcagtctccggctgtcgcttcgaagaagccacgctgggtacaccgggcaacttctgagagccaaaggcgcatgacgaacccacctgtgataataaactgtacagtcgtaatgggataagacctcgggatgcggacggccagaggttcatacactccgccgttcatggtatgaaggcggtgaggtcgaaggcggaagacgcgatagagcacgcgtcgtagtgatcttggtctttatctccgacccgggataaaaggactcctcacaagtatgtttcacgggtggcgatgggctgctcccatttacaatagcatagaaatcagtaatggtgttctgttttggggcacaaaagttttcacaaataattggatatagcttgtagatcggcgagataatccatgactcacatgttcttgtagccaagtctagggacgaagagacggcaaggagctgtgactcttacgctcgtgcattgtcgtcgaatgtcctcggttctattgaaatcgcatcgtcttcaggatcagtgagacaggtcaggctaagattcacacacctggggcgtggatattcgagctctcaggaatgcacacaggggctgtacagtagatcagctgaatctagtgttgtggcggagacctcgtcgcgtagacactttgaccagctaacccaaaactcgtatctttgatcgcctggcgtgaataggagtgcatctggtggagatcatatctctcacaggtactgtctgacttgctggtccatgatgtattctataaaagtcagtacagcggattttagtactcgatcaaaggggataacctatcgaatgcctcggacacaagcctgctcgactttgcgtagtcaagtgaataaattgtagagcaaattgcagggcgcaggggacgtatttatagggttctcggctccttctgttgcgcaagtgcttgcttgggagcaagcattgaaggacacctatcctaattgaggcctgttgaaacccatgtcttctttttaccgcgactatttgcggcgacatctttgatgcctttagatgttcagtgagagagacgagtaagagtggtgttgagaaaaagggacggtgagttggtcaagaaacgttggctgactgttgaatccttcacggccctcttaaatttggactttgtgggagatattcaatccgcaatgacaggcccatatttcttgttctgatcacctcatctgtgcgactcaacgaaaagcgcctaaaatttcatcactagaaaccatggacttgttcttcctagcctcgcttcagtgttgtgttggttgtgttgagttgtgggtctctcccgtctatactgcggaagcgaggtcacggtcggtcacggtcggatgtgcgggtgctcgacccgtcaacccgttgaagcttggctatacgttgtcaacactcaattttcgaacttgtgaccatgaagatatattaagacttttttttttctcgttttcttttttgaacctcttttttttggtgactgtaagttctacaatgttctgttcatcgagtttctgacactttcaacgaaagtgggagaggtgtctgattgaaatatatatctcaatgagggttcatatctggccctcaacatcgtgaggcttgatcagtttccccgacgattcgttgacactatcccttctatcaaattgactgccaaccgcccgctagaaataaaaaacaaattccatccaaaagctgagtgcgttgattgactatgtggtgaccgtaaaactcagtctatagccgtctgcgtctgcatattctataagagataccaaggctagttggaaacagtactatccagatccttgactttctcctgtggacaaaatggactccccaaacagctcgccagaccaggaaaagcaaggagaacagcagcccaatgaattgccaatccttaatgataaggaccataatctggagccttcagatcatgtccctccattggtaagtgaaacccttcggcttcgaattctttggctgaccatcgtagacctccccttcgcaacacgaagaagaaataagacataccttagcaaccgagccgtttcaacccacctggaaggtgctagcagacctcgaacgcgacgatcccaagtttgcatttccagcagctcgacttattggactgtatcgacgtctataggagtcgtgtatatccaagcacatcgatgtccaaaagattgaccagagcaatgagatcttaaaggaggctggtgcgtacctaaggaaagagagagacggtcttcagcttcaccacgagaagcagctagctcaactgcgctttttcggacaggcactggaatcatctcgggaacgacttattagcctactcgataactggaactatccctatagtcccaatttggcagggttatcagacgttgcaagagaagcgtaagaaattgcctattccgggctgccctgtcctatagtggcgatatagaaatactataagcggcagacgcggtacaaggggaatcacaccgtatccaaagcaggttatatattcccgaggctttttataagaagggcatcaaatagtcattattcattatcgtggtcttgactgaaatgagtatacaaacaaccccgcttgatttagaccaatctcaatcgtaatgactcgatatattatatacaaaaaagtgtgagtccagggatagcgtcgggggaaacctagtcaacagagaatgtatcgagagactcgaatatagtagagattccgtacaaggccaaagggatagtcggaagccagtgtcggttacacagatatcatgccaggtaattgtatctagtagctatctgcgtatccgatagagattccccatagccgtttcaacccgtagcaggaagaacagaccctttcctatagtcctatcagatactcggtcaaatcgcataaatcgaaattctatccagtgcacctctttagggaaaaggagcgctaatatatggaggaaaatgtcgctagcccgagtagagttggccagatgatctggacctgtccacttaaacccggacagactgtcgagattaggatagaagaggcattcgatcaaggaaggctcttaagtttcgtattctccagggtcgtctttgccaaaagaatcctgccacagatcattaggattagtagcgagacagggaggcggtgtcggtataccagaagattcataccagatagcgtaaaggtcgagatctaaatcgtagtctgtaatattagcgcaaactcctatcaaagaaacgggtatagaccattctcgttcaatccgttcatttctggtatatgactggccgtcgaacgctgtagggaaatatagaggtatataaagcagcgatttaacgtgggttaggagggatagaaagctggagactgagcagtttttattcctctcttattacacagaatcaggacaaactagggggatttatagctagatactaagttatcgaatgcgttaaacgtatcaatagcgtgcacgttggtacctgtcactaacccaaggaaaattcaccagcagtataagccttaactctccttagagaaaacagaaatagatagcgggaaatcaaatgtcattatttctgcccataaacgctctaccacatagagactttactaaccctcaggctcctcggcggaggaggcttaaagatcgctcgcttccaaggctgaaacgacactattacaaagagcctgaaccgctcgcttacactcccacaatactgaagcttacatattacagagctgtagaagagtatcgctatcgcttactagcaagtcatttgacgcttaaagccgtcgctactcctcctcgagtcgtattttctcggccgatttgacgacgtagcattaccatagacaaaagtacaagtcaagcaatttgaggactggtatagcaagggagtcattgaggtttactactttcatgaattccgccgtaagggtaccgcgtattctcgctgggatctattcagtattagtggggttttcattccctacggtgggggatataaccgaccttaggttcgatggttgtgccgtttgtgacttgctgtggttagttttctaacttgggttcattttctggagcttaggatactcggcactgtctcttggccggccgatcaataggggaaggcgaagtgggatggtccattttggtcatcaagatgaattggatctgaaattacgcttaaggcgcatttatagctgacaattcacacgaggctgctgttacttctactagtgcttccttacctaggatcgaccgcactttggaaaggccagtgaatagttagctcaactgttgatactcgatcttaccggctgctcacgaatcatccaacgatatacgaaaagggagaaaagagttaacgttaaaaaatcgttacccgacctactgaaggtagtttataagtgttcttgtgacgcgttgaatgttagacatcaagtagacctcggtgaaacttaaccgtaacattaatttaactgcaaatcatttagaacgaaggaaacagatataccgcgtttaagcttaatatcgataccaattgacgttagtaaccgcggatctcgcattgtggtatagacctaccaaaagtagatttcactagctcttctaggctaccaatccttagtgactgcaccaaaaggttcgatgagtgttatcatattattttgttttggataggcctccgggcattattggtatttcccagatccaaacgatctcctcaaactactgtcctcccacgtaccacgagcacgttaactgtgagatatgaggaaaacttgtttttcgagatttcagaggcttaagcgaaagctttataaattcaaatatacttttctcagtatcagccgatcaaaatctctcccagagatacctgccgccgcttccgaattggaatacacacgacgatcagccgccccatccccagaggcgtccccaaatgacgttaacagatcatgaaaatgagacaaaggcaccccgatcagttttaatctactaccgcgaacattcacaaagcagactgaaactaaactcttttagttccacaacctatcgggtcgtcgtgcgagaataaagagcctttaggtagccattctgtacaaaactcgtttgtaagggaagttgagagaccgcactgcgtaggcgagtaacaaactttcgttattcgtgaattgcatagtttataccggatgtatgtaacaactgtataattgaaaccgcttattatctggagaatgtctggatcctcgatattcacggctcgggccaacctaaatgcacctacctaagggtatatcgtagtttggcttcttcaccaggtagcctccggttttgaaaaaagcccattggggtaaacggctgtggcaacattgtgggatatgctggttggccattaatgtaccagtggagccgaatcataaggctctgagtgaactgtgatatctttagcttgatctaatagatacaaaaatcgggtggcccacacttttgcccgatagcgataacgtctgcactcaaagaaaagtaactgctttgtagctaaggaaatctcctgctgcgctagtagatacactaacagagggccctgaagcagctgaaagcataatactccatttgtccgggagtcaagcggcacagtgttttaacaatgattcccgtcatctcccgcccatatgcaccgctcacggtgcaagggatcacctaatacttggcccaatacccattatagatgagcaggattgaaggccataatgaaaaagtaaatttataagcgtctcgttccaattacgaggtttgtatgtaagcagctggtagtccccagcacccctcatcttgttcctgaaaagcggttattatttcctgggagctctagccacatttgtcgggatacgcgcgaggcatatataatgagtggagatacgatatacgggacttacatggcatctaggttcactgggatatatatgcgactttccccttataactgggcctcaagatccaagaaaccggcaaataattcatatagcagtgtagcaatagagcctaggggacccattttaagggggaacataccacatatcgtatccagagccttcggtcttaaagctcataacccaacacgctcttcaaaatacccttaggcgactcgcagtttgccagctataccattccgcgaatgcacggtctaaatgcacggcccactgaatccaaagagtgaactagaatgagatatccttcttacaacctactgatcagcggtatagcggtagatactgcatcgcaatatattcttcgacgttttgactgtttcaagcgagaatttccatgtcagcagccctgacacaatgtaagtatagttcccataatgaaggcatataaagctagcgaggaaaccctacagagattgcgcaacatcaatacctattcgaatctttttctgcctttatcatcagcacaatatcctctgtcctaccttagaacccatttgctgtctgcgggatcccttatagtggtcctgtgtcctattgcggggtgacgaagaaaggcaagccgtgcaaaaactctgtcaaggttcaagacactaagatcggctatcaaaagttaaccactctctccagagagccatttgacctatcaactttgcagtcaaagctctgcaatattgctagagtctttctctgcgcgagatagcaccgtcaacggcaggccgactaagttagctagcggtagtataaagcagccatccgcaaccaggcgcgagtgccgcatagctctagagttgccgctccatctattacacatctaggccagcgtcagatattatcagtctccaggagtcgccctgcattaggcaacaccgacaggtcaccttacaggctcagataagacccaccagtgcggctgtcaactaaccccgagccagtgcagccattcaatccatttatcacttctgcaatactacagacgaacagtgttccatggcatatttcgccggcttaaccagctatcctgacatcggtcgctaacatctgggctggtatccaaagcttaacgctcaaggatctcaccctgagcgacaaggtcgacgacatctactgtgtattttgtcttaccgaggataaagatcttacaaatgaatgtgtgatcttacgctgtcagtgtaaggcgctttcccacctagcctgcgcggaagagtggctggaaaaacgaagtacagtttttgggacgtcatgctatatatggtaagtagggctgattctgattatccaatgcccgaggtgctgatcaatacagtcgaaacgaagggcctttagacgcttcgattcgcccactacgagtccaatcgtcggatactgagacacatcatatgcgcacggcaagtgaatcatctcccgagagagaacctgccactatcacgaattcatcactaaatgacccgagtcagagccagtcgcgtcagcggtcagtgggaccccaagggagatcagttgagcagagcgtggaggatggcccccgtcgctcggctaggctaggagctcatctaccacaaggcccttctacatctgcaccaccccgccggtcagcacgactaaattccactcgaaggtgatctttgtcacagcggaggtgtgacacagtcggcattgggattagtatcagagagcatagccatgatttagaccttggagtaagcttagaaataatacaaatgaagtcctgaacgttcaaaatcgcagagcaccaaaaccacgcgaccttttcatctttgcaagtactagatgccaatacacccccaaaaccggttggcagtttcgcttaatttcggatattttaagatcgaaaccatattcatacctaacggtggtggccaaagaattgtagacatggatttatctcagtggagcgtgtcgcgtcaagacggagattgttgacagaagaaacacatctcgggccggcaagagactctggcaaactcctatgctggttaggttgactctcggaatcaatatgttgaatctgggaaactcaaaagcatttctaggatgtcaaggatatacattaagcatgcggaacggatggagatatgatccgcaggggacccacatggtgtacatgggttcacctgaacgcgaggaagctacctttcttttgcttcctcgcgctgcgtcttgtatctggagtcaactatagttgtttttgatattgattattcatcttgaaacactatccacctctatgtatacgtgagaccccgccaaccccgccaaccccgacaacaaagacaacaaagacaccatgacctccaagtccaacaatgggaatcctaacgctcgaggagcagaggaagtagaacggagaggacggacaaaatcaacgcactgagcaatcgcgcacacttcgtgccatctttgcccatagcttgcttttcatatgacttggacgaatgatgtggtttgtcttcatatcctggttcaaaagtgtaaccctgcaaccgttttttatgtccctgcccttgcaggctggaccataccatctaccaagcgcatgtggatgcggtctgtagtcaggatcccatttcgcgatatcggatgaccgaagttcctttatcgccggatatctgtagtaacagtattccgagtagactccttgttttgtgttggtgaaaaccttttccaaaggtagctttaccgattcatgacattcaataacatcgtaaatattcaaggtaatgccagacgggaattgcacctcatatctattcttgtcatatttccagccatcctgaagagcggcaaagaacttttcactttcgtatctgagatcgcctgaataatcacctgcgataagagcaaggtagagacgggttgacgattttctgggccgataggcgctcaagttatggccaataagaactggagaacatccatcaaatgtcagagcaaactccagccaactagtatttttgaagatctgtttccagaggatagaactggtgtttatgatgttttcgacatctgctggcgtcagaaagtccttgatacttaaccaaatatcaagtggggtttcaaagagcttcattgtgaatgactcgccctggtgccggtgttgatccagatcgtaccagggaaagtatttataacccacagcgctatttcagaaatgccttaatcttacaaaataacaagcaagagtcctacatttttgtcaggccctccgaaatgcacctatacctgtggttatagagctggtcaataacagaatctatcctccggatttctctgaaagttgcggtggcctaattccttacccatccgaacctcccttatttgcaccctagctcaaatagatattttccataggcgagaaaacatgctgttgatgttcagtggttgtcatgttcaacgttccgaacgttaacatcgattttctgacaccattcaccacccgtacatcgccaaaggttgttatctgagaatgttcagcgaatgtatcagcatgatactaccaggctgttgtgccccagtgctacaggaagcacaaacaagactccgccggtcgcttttttctttattagctgaatcacgacgggatagcaacccacgagatatcggaaatgctacgcccttccacatgtccctattcactaccaattccaatctagcagccatgtggctcccgggaatacactgtaaatcaattggtggttcgggcaacacgtggtcatggcaactggattgagacatcgttgattggatcgtcttggtctacgtaccgtgattgaggcaacaaattaacatccgcagtcctcctgggagccggcaccgatgttgctaacccgcgaaaacttgacagcagatatctttttcatggtggacatcaagcattcaaatgctcatgattgtcccattgtggaagctattacacccttattttcctcttgccagtgcagcaccatcaccagcaagaaggaatcatcatggaccacaagctgtcacaggtatcaaagggtccgataccccagacatagaagaaaacaatggactcacatggcaaactggtatcgttatcttagatccccttctcgaggaattcatcggctgacaatctatctcgtggaggcaatgaaccgactgaaagcttccgtcgggttgttggccagtttatcctcggaaatagcggccacacaagccaggttttacagccatctgttgaccagcccagtggctctgtagctacagagttagctacttctgttgttagctcgagggactatatgatcactccaagcgccatgaaggctgaaagccacgacttgccccctctgaacgtgaaaaagagaccagcggaatccccaaccttttcacgaaagcgacgtcgacattcatactccagctctcaaatactgggccgctcgcagacttgtgcatcgaaagagactcccaagccttacaaaaattagcaggcaaatgataaatgatacaattcaatacctgcaaatgctatctgaccacatcttgatctccgacaccattttgtttagggagtgggccactatgcatctcgccacccaattgctacaaagctggtacaaagatatcattgcgaggtaggagatggaattagacgccgtatccaagtgtactttgtcaccgatacagccagaagagaagtgcacgaagtgtgctgccgcggatgcggacgagctgtatgattaagaggttactcctttactacctcgttggctatcttttgatagaatagctggcccttttggaaatggacgagaaaatatagtgttttgcaactaagggacagtatttaagatcttgttaagctcctagtctatcagtccgcggacaaagaacattcaggtgcggagaccactcgacaagcaaaaataaatatatatgagccagctgcatcttgatctccaaataatgcaatagcgactaaagatgcctagagtacatgtatgtaccagaaaaatcggaattggaaggatgaagcaatagcattcttcaaaatgctattgccttgaatatcaattccagccactctttggttattcagcccgcttcactcgtagagatgcaactttttgtgctttagcatctacaataactggaccatttttgccgttctgttaatcggctcatgactgctggtccttacaattcggctgtttggcggtcattctgtgtctaaatgtctgcatactcattcagatgaaccaatatagaacagcttggccctatcattggtaagacaagaaaatcagagcgccggggcccaatcagctgtgccagtattcgtccgagaattgtgagagagcgactcgctgtgctgaaaagccagcttccaagccaaaggcatacctaaccataaccaagtccaccgaattctctctcttcacctggaaaacatggtcgttgcagcgttaactagatgctggtcgcatagaagttgcgagtggtcattacatggccatgtaagtggagctctgtgcaacgcaataattacaggcaagtttgccacttcatgagcctaccaattattgtaataaccacaccatgcctgatccggtgcgctcgtcgactcatgagcgaaacataaggccgccgttacaaagaagctgccgcagactctgactcgtttgatagcttccgtctttatttttggcgcgttgtcggtcctagggaaactagaatttgtccgtggacagtattccctagcgccgtgtagggtaacaagatcctgaaaaagttgagttttgagcagtgcggtcatctgtcaattcgcatcgagtttctaattagctcgagactcaggttcattatggctgacagtttattgtcagttataaaaggatacacgcgccgttaatggtttgtatgtaagctctgtggctgatcggcctcatcttacgactgtcagtcgatgctggcatctcctatcacgaccgagagtcgaatccctaacatcgcacgtacaaaacaaccgaattgcactttctctcttagttcttacgttttgaatccgagagaacaccgccctgtcatcatgtcatccaacctacccaaagacaacatgatatgtgaccttggcactatcaaagctcaatatcagctccccatttcgatgtcggcccccaccacccgcgagagttatacggcggccaccacgaatttaacaggacctcaccgccgcggtagattgaaggttgtcacggggcctcccaaaagcctttgcctaccccacttgtgtggcctggagaatatcgcatccgtcctgattgtaagacaggagtcaccgtgggatacctatcggaaagtcattacgtatgagaatgctggcaaagttacaattgctacacgccgcactcgcccgtctcgcatggtagccatccggacatacgggaaagacaatgctcgaagattgatatacagattcggacgtctagaacacaggaacgttctctccttacatgaatgctacatgcacgaagatctcgcgtccttcctagttgatgacttgccgctgacgctggctcatgttgtcgcttttccgtctttacatgaatgctacatgcacgaagatctcgcgttcttcttagttgacgacttgccgctgacgctggcgcatgttgccgcttttccatctgtttatcctagcgagacagaattgggatccattatctgccaggttggtccctcatgcccttcgatgagctgttctgacattttagatcctggatggtgcctgctacttatcttcatttggccttgcgcatcaatcactggcctgtggtgatgtattatttggcattgacgggatcatcaagataggtttgttaaccgccgcattcttgcattatctgactaaaatttcgcagcaagtttggacctttatatagattgcacgccaaagcaatctgaaattgcatatattgcggctcttccgtcgataatgatgcggctcatgcagaaaaatggcaaagatcaaggccttgttggcgtgaatgatctggagcgatggccaatcgattctgccgctgtggagattttgtccgctaccgagacggcagaatcaatcaggtcgctgagaaatgtgagttctcctagcaaggtatcgtgtttcgctaatgtccagtagcaacccctgttggcggagaagcaccgcccaaacgatgatctggtggtcctcgcaagagcagctctgctctccactagcttgaattgtatttacgaccccggctctaaaaagtgctaaaggacaagatctggtacgcaactcagatatccgcgaatcctcgtcatggtcataggcttcaccaataagcaacatttcatgcgtctcctacagttatcttgccacttcttagggtactttgtttcttccacgacataatccattgtttttgcacaaatccttctcatgttgcgttctagtgaacttagtactacataattaacgttacattgctggtgaaagatcaaggctaacattgaataccgtagggacttctggtgacatgcgcaacctttgaagagccgagtgtaaagaatttcatgcgggcaatctccattcgataatgaagcctcatgcattcttttggaggagctcacaattttcctactaaaaataaacttagctcttcgaagcccaattcttgagatcgcaacggcactgaattgttagacgtccataaattttaaggcagccagaacgcaagaagtagggcggggaaacagccaaactaatgtgaaggtttcagaagtacgtatgtatgtcgcttgcagacttcaaccaatggtgaatactgggaagctgaaacaactggtgagcaacggcattcaggggctatgtctccagcttttattacccccagcggccggttagtgatcgtctttaacactctaaagttgagttggaaagagccagcaccggttggttcatttcaccgctagtgaactagaagggttggttggcgtacgagctatccacgccaaccctattgtttctcgcctccttccaaatttccctcgggaccataacttatttataaagacctcccctcagcttccactggtcttcatgtttgcacagaacacagtactttgaggttattatttgcaacacccaccacaaattccatgcattacattactgccctttccttgatagcctccctcctgggaatggtagctgccactggaaactcagtccgtcgatatgtgcaactccgtgcttggggtcagcccggctgtcgtgctagtaaccttggcgaggaaggtatctacagcgattacattggtttatatatgccatttagtaattacaatataatccgctccgtgagcgttgagtctgtcgaatcaggatacactcgtaagtcccggtaatttttagactgtatattaccactaataaatttttagtgtacatttacaggaatctgcagtatcattctgaacggattaaggttccttttataaaatgcgttagtggcgaacacgagtataaaatgtacatattggtatacgatgactgagatgtacttcccaggaagtggtagctaatcgaatgcataactaggagatatggaaggctgtattaaactgtattgtacttacctactctgtctcatttgcaccccaacttatgtaagagggggtttttgagacctatactacaaccgagaaaattacaggaagataaaccagtcagaaattccagcaaattaacttctcaagatgtcaaaatggcctcctcgaacttgatttaagtaaattaacctttggtttcttgatacaccaaacgcacttgaccgtcccaggttgaccacccataagtgtcggttgtggaggattgaaagaggccagctatcatatatataagctgacaattcgttgaattattttcctttgaaggctccttagcgttagtcaatgttatcggcaatggaagtcgtttaaaatgttgccgtatccctggctttatgctctaaaattcctcatgaagcgttcttttcagcagacgcaatatttctttttattataagctgcccccctcatttactgtatctttttgctatccgagaatggatacacgaaccagtgccttaataagaggtcgaaaactaatgtcaatgacaactttaaaggcgttattcttctgatctatatctctacagtactagtcatgaatataaataattagaacttttccagcctccatcaattgccacagctattactcgcactgaaatggccccaagcgctctacggtccagcggccaagtgccaaaagccattctgagctaataccactactcggtaatggttctgaaccgccacagaaaaagagcactcgctataatacacacgcttacgcaaaatcactacctccagcacctccgggatgaacccggactcctcgaacgcggatacaaaataaataccacggagcacaggtgtcattgctagtaaagccaacagaccaccgcggcgggatcaattgtcataactggattctacagatgcaaaaggccccggccgctcaaattagtatttcgaagatacctcacttttagatcgggatgggctcaatgtaggctcaagataggctcagggtaagctcagggtgggctcggggtaagctcaaggtaagctcagggtaagctcagggtaagctcagggtaagctcagggtaagctcagggtgnnnggtaagctcagggtaagctcagggtaagctcagggtaagctcagggtaagctcagggtgggctcggggtgggctcaggtgtggccagattggtctcaactccggtgaggggaaattctgtaagttccccgcactgtattgtcacacttggttatccattacccgccactcatcgctgtttgttttgtatggtaactttacatcataccggaacaatatactgtaatacaccgtaatcgtgccacgtcgcccatcatggaccattttaacagaccctcaaatcaattgtctttatcatcaattggtcttcctcgatactgcatcctgcatcttagtagtgtccagtatccaggcggatatcattaatttgtctgtaaagtgcggggtgtatatcaccgttcgaacacacttgaagcccggtgcccgttttacttgtcgtttcaatctagtccttagctgtggtactatactacagtttcatgattcggactcgtagttggcagctgcctgtatgtttaagagcacgacatgacaaaggaggcacatatgacgataccccgttccttccaccaacatgacgtcttttacccgaaattggccaggtttatagaggcgaaaatcaaacattcttgttatacggcaaagaccagctctgccaaaatttaaacgaggctacatgtcccaaccaagataaaaagtatcgcacccataaccctgaactacgaaattctccgataacatcttcaggaagtgaggaaacggaaacttcttcctattcatgccagaccaagggctgttttagaagagcgggagacagtcccatacaccctttccgtatgattcagtagcgcggactttgactccaacttctccccgcaaatagagcactcatagtacatatcatttgaaaacggcttgatatgcctgttgacgaagtgtcggctcagagatccagggttcttgtacatccgcaagcgctctctttatggcagactagggctactaaggtaaatgaagcagatcgttggtctctctgttggagatttaacgtaaaccgaagcgatagccttcgaaaacatatcgtcgctcttatctgaagcggttggattctaccttttagacaggggggcggctggtagcatatcgatatcatcggcggagcgtttttaggtgatacgacgccgcgagggtataccctcttctgcatcgcatactgtaatcactatattaatcgcagcaattcgacgcttatattctttctcgatcgtcgtacccggcatcgttaggacagtgttaataagtgtcatatgctgcggtatcatatagccggttcgttccagtgcaaccaatacttcttcgtcaacaacctttccggaaagttgccgttcgctatcgatcactggctgctcgttcttataacgctccaggttctcacgaatcaagaggttccgttgccgccctttcttattctgcagttgcttaactgagcgatcatactgctcgtctacattattaaacttttaccatagctttttcactctcttctcttaagctttccgtcgcttacggatcgttcagggttaagggaagttcctccgcaaaagattattactaaactcccgctgtaatgcagcctaggcattttcatatatacgctttttagcatctcggtcttatttccgcacctgcttcctctcttctagagtgcggacacgtggaatgttattgatatagcttgaatcctctagtcgatagggtctgcagggatcaatggaccgactcatcgagcaggcaaactgtataagctgcttctaagcgggcaggccccatacaattgcctaggcatctacatgaatacccacgctgtagtgtcgaataaacgtatcgatactagcatactgcagcataacgttctgtagttcattggatacatccgctgattaagaggaaagtattagtctagggatcccatcatatacgttatttcactcacgactgtcgttgaacgcttttgctgcaccgtatcggaggcaatatggcttcgcgacttctgcgaagcccgtaatttcaccacctcgtttcattcagtaactcagccatcccctagtaagtctttcttctagtgcgatttaaatcccactaggctcgcgtagtacttggtaaaacacgttttgactgagaattttgtctttcaattttaattcctgctcaccaagtctatagaggacccgaagacggtacagtttctcagggcagtccatcacagggccgtccttggacagacttttaaatgcgccaatcctaaagagtatacctagcagaaagacataaggactgagaaccagggtgggatcaaagatgatttccggaattgggaacgtattcctatttcaaaatggtaagcaagctttgactgggtccattggcggaagaacttcggcatacagagttgcgcagagaaaatagccattaagtgaaaggggaaggaaaggaggaaaaaagaaaggggacgtcttacgactctttctcgccaagaaatgtttttgtgaattccggcctcaaataaatgaaaagttggggccgtccaccatttggatctcgaactaaggttagcttaaggtcctggaagcgaagtttcaatagtgctcccggacggctaccggtgatagcggctagctagcagaaaagaaggagttgtatccggtaccagctataaggaaaggtcatttctgttgtggataggatcactcgcgcaaactcggccacatcttcgacatatatcgtcgctttcggtcgaccttttagagaaagacctttttctgtcgcaactatcgcaagcacctatagaaagtcagccgcgtcaactgatattgatatcgatactcaatcggaatctcacgtcacggatcttaacatagacatctttactgagctcatatccaacctcggccttgtagatcagatgccaccacttccaaaatgcatcgagcgtgcttttggttttcactcccgcggtgcgacgacgtctatcctttccccgtcgctggtcacaccgccataagaagagagccttgaggaagcggaccgtctcctcgttatcagaaagccaatacaaacattccgcaggatcgcgcttagtgcccttgcagaacctagaacaatcagcgaaccaagtaaggtagggggatcttaaagtgaagtctcacttatcccagaaatactgcgcctcatccaatctctcttaggttttcgggctgtagcgtttatgtcgaagctgggaaacatcaagagactcggcctcgtggaggtaatattcgggtggaagttgctcctcttcatcttccgatgctaggtcatcttcggactcaacttcagactcagactcggattcgctgcttaagtcgaagacactgggtgcggtggaggaatcagtatcggaagcgtggtccgaaaaattctcagaatggcatgggctaatatcgctctcatcgccggacggaatagaaccacgagatgccatggcaggaggcgatgggtgcgatcgagaaggtacaagaaggcaagtcagagaatagggaattggtagtaaccggttctcttttcatactgtggccgtgccgttgaggagaccgacctgagagtggaagggttgcttggtagcaagaaagaatattgtgtcggggccatggccgttgatatttataaaatctgaaggaaggagggaaccaaggaggggagccatcttcggttcctctgcttcaggagatggatgagggtggggcggcggcgacagttgctatagcagaaggggccttgttcgggccaggtaccaggcacagccaacacaaagcatgggtggcagtagagagagtcggccgtgtgcattgaggcacgtgatgccaagcccagagacggtgagtggagggcttaaaacggcctccgaggcggccatttctggcctcccattcaccgtctcatacttatgtgtagtattgtttagcgcattttcggccttatcagagccttatactattaatatgattttatcgaatattatatcggcgaattctgggaggtacgagagattctggattcgttcttagagtgtatcgttaatctaaacgtacagctagctagccactatatataactagtattcctatctatcaaatttcgggttacctacagtggggcgaggcatactgctgttaataatatattctagtctcaatggcgtgagagcgaatttcacagggatcgcctatctataaggatttctggaattgtacttgagtgctttgactttctgtattttcgcagctgagatgttaggtaggttagtggcctgattcttcttattgtatccgttacccgatgatattgtgttggcctggggttgagaggtgtttcctatctcctaagacgcgttgttgttgcctgatggtaaaaattgtgactgattattcgggttgtcatccccagagtcgacactgctatcagctatgctgggagctggtttgccaattctgttgttaattgaggcttgcgaggatcaaatccgattggcgagaaacgcgcgttgtgcgggttaagcgccgggaagtgggatccaggaaagagactcagggttggaggttgctagcggtccttgctagctagagacaagtgctcataacctaatggcgtatctgactacgttgtacctgaaaagggaaaacaactagtgtagattcgctaagatctaaatggacgagggagagggagagaggaagagggagtggaactatctgatgatctgaacccacatgggtgaccgccttccggtcacccaacacatgagcctcattttgtatggttgctggaatttaactacagcccaagttatcaaataggtttatgcgaaatggtcataatgatatctctaaaatacggattgttgtgacgcccccaaacagagacacgacgatgcaataaccactatgtgacatgaaacatttcgaaagttgtttggaaacgcgcagattcttcgctgtgattgacatgtgatcatctgcctcaactgaacgtcccattagcaggcccaaaatacccgacagctggcatcgacttgtatggtacaccctgggcgtcggcagtattcaagtacctgtctgcgtcagttgcgcagcgtgccgaggcgcttcataagtgtcctgcgttgatgtttgttgcgtagctatctgttgttcactgcgttctggagtctgttgagttggtgaagagaaaggatactggtactctgtccttgtctgttctggggacggagtgtcttcccttggagttgactctcgtggggagctggtttccctgatcaagtcctgttcaatcgagtctgcgtactggtgtacttccagcatgtccatctcttctgcgttgattctagctgtgagttcctcaagtcttctctggaagttggctttcctctctgctagcttttctgtcattgtaatttgctccgtctgaggggttgcattctcactgtgaacagtctgtgtctcctcttggattggagtaagagtctggttgactctttgcgctgttaactgttctgtgtttttgggaattggtgtccctctctgaagtctcccaaggatcgatcttgtgtgccttggtgcagggagtagcctctgtcgacgaggcattaccggggtctctggtatggttgaaacgctgccttgaattgtgggcaagtgaattgttgacggggttactggatcctgtctgtagactgttacaatctctgtccttggttcggttctggctgcgtcgatcagcgggatggaaatttcgtttgtgtcgtcatctcctgggggtttcgatggctttggcgctaccggtactcctccctcctgatcttcgtcccctggttgaggaaagctgacgtccctcgagattgtaatcttcctagtttccggattccagatttttagaatatgtccgttatccccctcataacccatgaggtgtcctttccaagatcttggagcggctttgcgtgcctgtactctcttctccttcggaatatgaacgtagacggttgttccccatggtctgaggtgcttcagtgacggatctgggttgtcgattccgagttctgtgcgccagtgtttgagtggcgatgtttgagactttgggttggttaatctgttgatggtgtagattgcagtttctactgcgtagggccacagctcctcaggtagcttagtatcgatgatcatcgttctctgaatgtcgttgacgtatccgccgaagcgttctaccgcgccgttgggctctgccgtgtagggtggtgtaacttcgaaagtcattcccttttttgtgccccaagtgatgaagttcttaaattctgttccaccatcgagtctccatattccggggtagcgcccagttcggagtttgattttttcgcaaaatgcttgaagcttgacaaatgcttcacctttgttcgtgagagtcggcccctcgagatatcttgttgcgtcgtcgaggataggcatccagtacttttcaccgttcgggccctcaggtttcataggctgcgtgtctacatgaaatttccatgccacgtcctgaacccgaaattgcggctcacgagaaatctgtttcttggatttaccttgaaaacatgcttcacagtcgaagtattctgttccatactgttcttcgtcgtcaagctcttgtgcttgtttcagcgttgaagtaagtttggcttttccagcgtgtccaaagcgtcgatgcgcctcaaaggcagaaattttattgactaatcctgtttcttcgtcactgtccgacccgtaggatgaatcttcttcgtgtgaatcgtcttctttaggaccgatgaggtacggaaccccgagtgatgtgtttgcaactccaacggtttttccagtgccgtctgtaagtcgcttagttcttgtgtcatacgagatatcctgttcttccaggagtttctgcatgccgaacaatttgccgtgaccccttgggctgtagtagccttttgtcaggaaggtgtatgttgttccgtcttcgagacctgctttgacaaggacctctccgtgtccttcagttaccactctgttgccggagtagtcccggtaggcgtatgccgattccgggctgtcctcctggtatgtgtagaaatcttcgaagtcgtgggtgagtgttttgtctgatccggtgtcaatcagccagctgttgaaactatctgtgtgacgagctgttgccgttatggccatattgcttcgcccctcgcttcgcagtgcgatcgagtaattccatacgtgtgggctgtgtgtccagtgtgcgggtggatcttctgacagataggaacacttttgagctttgtgtggcccgaaaccgcagtaggcacacatcccgctctcatccctttgtgttccttccttcttttccttgacatactcatggatatctttaccaggaggtggttggttgcgaagggtcttcttcttcttgggttcgttggatgtacttgagtcatccttcgaagatttgttgtcttggcttgaggaggcttcgctgttacctcctttgccgcccctcttaccacctcgtcctccgcgtcctccgccgcggttgttaccccgtcccctcgaggactgggctgcgttagcagtcccttctctgtcggaaactgcctggaggctcttgcaatattggtccatcttttcgagtgtgattttcttaggttcgatattactaatctcctcgatgatgaattgaaccttggatatttctttatccaattgccgtagaacttgtgatagtgcgtgaaaagggtgtggttgaattttgaatcgcgaaagaacgtggtattgtttctggtattccgcaatgaattccttcgcagtgttgaagtccgctcgtttcatttcgtcgaacttttttgtttcgtttagcgcattttcggccttgtcagagccttgcaccattaacatgatttcatcgaacattgtgtcggcgaattccgggaggtacgagagattctggattcgttcttggagtgtatcgtcaacctgaacgtacagccagctagccactgtgcgtgaccagtactcccatctgtcaaatttcgggtcacccacagtggggcgaggcatgctgctgtcaatgacatattccagtctcaatggcgcgagagcgaatttcacagggatcgcccatccacgaggatttctggaattgtactcgagtgctttgactttctgcattttcgcagccgagatgtcaggtaagttagtggcctgattcttctcgttgtatccgttacccgatgacattgtgttggcctggggttgagaggtgtttcctatctcccgagacgcgttgttattgcctgatggcaaaaattgtgactgattattcgggttgtcatccccagagtcgacaccgctatcagccatgctgagagctggtttgccaattctgttgttgattgaggcttgcgaggattaaatccgattggcgagaaacgcgcgttgtgcgggttaagcgccgggaagtggggtccaggaaagagacttagggttggaggttgctagcggtccttgctagctagagacaagtgctcataacctaatggcgtatctgactacgttgtgcctgaaaaggggaaaacaactattgtcgattcgctaagataaaagtggacaagggagagagagagaggaagagggagccgaactatctgatggtgatctgggtccacatgggtgaccgccttccggtcacccaacatcccccctacagatctcatatctcctgttttgaaaatgatgatctagaaatgtcgtaatcgtggtagtcgtaaaaaaaccccaaattttcctttgaattaagtcatcccgataagcttcaagaaagctcggaattgctctttgggaagcgcctttgtaaacctgtccgccgcgttctgctttgtgttaacccttaggatatttatatgtccttgggccatagcgtcctttataaagaaccatcggagtgccagctatctggtagtagacttgcctcccttctttattagtagtaactgtgagttgatgttatcggtgtagataactgtgggattgggtcttagtaggctcagtgagtctgcaaccttagtaagctatatagtatcctgggccggctggttgagcgtataccattctgctattattgtggagttcgctgtgattgtctgctttttagtagactaagctactgggactcctgtaaagaactagatatatccttcggttgatttggagtctgtctagtctgtgtataatatatctgtgaatgctatgaattgtagttcgtccgactttctaaagattagtcctatcttagggttatgtctaaggtatttgacgacgtgtcttattgccttgagattagaaaaagtcggtattgctagtctatattataagcgtataatagcgaatctaatatctggtcttatcttaatagtaagctagttgagtatccctactactgtctggtagtattcgaaattctcgttattaagtagattagagttaatgtcttctgggttagactctctctatcttggtagtagtggtatttctttcgtccctgtagtatctgtaatatatagaatcttttgtatgtaggcttcttaagatatgataatcgtcctattgttgtaatctctgtcgagtatgtagttaagatactgttttggttctcctaggtcttttatattataatgtttcttaagttgctttataactgagtctatttctctggaagtaggtatagtaatgataaagttatcgatatagattattatgattgttagatctgcgcagttctttcttatcttaatgtagatatatgggttgtcctcgaggggtctaaagctggtttatcgaagcttatagtctatttccttattctagaggaaggcagagtcttataggccgaaaagagtctaattaagtatatatacctattactttgaatttccttctgtatctgtaaactcgaagcctattagctgtcttatatatactgtctctgtatcttctcttaatatattaaggtaagccgctgtgaaatctacttaatgctatttaagactatagactgcgataagtattaagataattttgattattatttccgatataactagtatataagacttgcttaagttatcgcttttctcctagaagttgctgtagataacctatcttaccttaaagctgtagactttatctcttgtgtttgtcttaatggtaaaacgctattgtcctggaaggacttttgcctttggtagttttaggattaatgtctatattcctttcgtggtaaggttattaagctgtttttctattacttccttctatttgttctagaaaggtgatttttatacttgtttaaaacttgatagtaggttgatatccttattgtaaagaggttttctattatagataaaaggtgtgtctatatctacctaatcggagttatctagagaaagtttctttgcgtttccttcttaagaagtgatatgtttttctatatgcctggtatctctcttttacttcttatattcgacgtttaggagtttttatttaggattctgatatctctctagtaggatactgatatttcttctttttaatctcttagctgaaggttcttaaatttgagttagtactactattactggttctgcggtaggtataataggagtaatcttctcctatatctatatcggttgtatagtgtactgaggcgctttataagtactctgcggtaatatttattatatagcagtttcttataaactgtattccagagtctgttaagttagtaaagagaaaggatactggtactctatctttatctattctagggatagagtatcttcccttagggttaactcttatatagagctggtttccctgattaagtcctattcaattgagtctatatactagtatacttctagtatatctatctcttctgcgttgattctagctataagttccttaagtcttctctagaaattagctttcctctctactagcttctctgttattattatttactctgtttaaggggttgtattcttactataaatagcctatatctcttcttaaattagagtaagagtttagttaactctttacgctgttaattattctatatttatgggaattggtatccctttctaaagtctcctaaggatcgatcttatataccttagtataggaagtagtctctgtcgataaggtattactagggtctctagtatggttaaaacgctgccttaaattataggtaagtgaattattgatagggttactagatcctatctatagattgttataatctctatctttagtacagttctagctatattaattagtgggatagaaattttatttatattattatctcctagaggtttcgatggctttagcgctattagtactcctccctcctaatctttattccttagttaaggaaagctgatgtcccttaagattataatcttcctagtttctagattctagatttttagaatatatctattatcccccttataacctataagttatcctttctaagatcttagagtggctttatatacctatactctcttctctttcagaatatagatatagatagttgttccctatagtctaaggtactttagtaacggatctaggttatcgattccaagttctgtatactagtatttaagtagcaatatttaagactttagattggttaatctattaatagtatagattatagtttctactatatagggctatagctccttaggtagcttagtgttaataattattattctctagatatcgttaatatatccgctaaagcgttctactgtaccgttaggctctactatatagggtggtataactttaaaagttattcccttttttataccctaagtaataaagttcttaaattctattctactatcgagtctttatactctggggtagtacctagttcggaatttaatttttttataaaatacttaaagtttaacgaatgctttacctttatttgtaagagtcagtcccttaagatatcttattgcgttattaagaataggtatctagtacttttcactatttaggcccttaggttttataggctatatatctatataaaatttctatactatatcctaaacccgaaattgtggcttataagaaatctgtttcttagatttaccttaaaaataagctttatagttaaagtattctattctatactattctttatcgttaagctcttatacttattttagtattaaagtaagtttagcttttctagtatatctaaggtatcgatacgccttaaaggtagaaattttattaactaatcctatttctttgttactatctgacctataggataaatcttttttatataaattgttttctttaggactaataaggtatagaactctgagtaatatatttataactctaacagtttttctagtactatctgtaagtcgcttagttcttatattatataagatatcctattcttctaggagtttctatatactgaataatttactataacctcttaggctatagtagccttttattaggaaggtatatattattctatcttcgagatctactttaataaggacctctctatatcctttagttaccactctattactagagtagtcctagtaggtatataccgattctaggctatccttctagtatatatagagagcggctttgtgtgcctatactctcttctcttttagaatatagatatagatagttattccctatagtctaaggtactttagtaatagatctaggttatcgattctgagttctatatactagtatttgagtggtaatatttgagactttagattggttaatctattaatagtgtagattgcagtttctactatatagggctatagttccttaggtagcttagtgttaatgattatcgttctctagatattgttaatatatctgctaaagcgttctactgcgttgttaggctctactgtatagggtggtataacttcgaaagttattcccttttttataccctaagtgataaagttcttaaattctattctactatcgagtctctatactctagggtagtgcctagtttagagtttaatttttttataaaatgcttaaagcttgacaaatgctttacctttatttgtaagagtcggtcccttaagatatcttattatattgtcgaggataggtatctagtacttttcactgttcaggcccttaggttttataggctgtgtatctatataaaatttctatactatatcctaaacccgaaattacagcttataagaaatctgtttcttagatttaccttgaaaataagtttcatagttaaagtattctattctatactgttctttatcgttaagctcttatacttattttagtgttaaagtaagtttggcttttctagtatatctaaggcgtcgatataccttaaaggcagaaattttattaactaatcctatttcttcgttactatccgacctgtaggataaatcttctttatataaatcgtcttctttaggactaataaggtatagaactctaagtgatatgtttataactctaatagtttttccagtgctgtctgtaagttgcttagttcttatattatataagatatcctgttcttctaggagtttctatataccgaataatttgctgtgacctcttaggctatagtagccttttattaggaaggtgtatattattctgtctttaagacctactttaataaggacctctctgtgtccttcggttactactctattaccggagtagtcctagtaggtgtataccgattctgggctatcctcctggtatatgtagaaatcttcgaagtcgtgggtaagtattttgtctaatccggtattaattagctagctgttgaaactatctatataataagctgttactgtgatagctatattatttcgccctttactttgtagtgcgatcgagtaattctatatatataggctgtgtgtctagtgtgcgggtagatcttctaatagataggaatacttttgagctttatatggcccgaaactgtagtaggtatatatcccgctcttatctctttatattccttccttcttttccttgatatacttgtggatatctttactaggaggtagttggtttcgaagggtctttttcttcttaggttcgttagatatacttaagttatccttcgaagatttgttatcttagcttaaggaggtttcgctattacctcctttaccgcctctcttactacctcgtcctctgcgtcctttactacggttattaccctattccctcgaggattgggctgtattagtagtcccttctctatcggaaactatctagaggctcttataatattagtctatcttttcgagtgtgattttcttaggtttaatattactaatttccttgataataaattgaaccttagatatttctttatctaattactatagaacttgtgatagtgtgtgaaaagggtatggttaaattttaaattgcaaaagaatgtggtattatttctggtattctgcaatgaattccttcgcagcattaaagtctgcttattttattttgtcgaactttttagtattatttgacacggtgagcggggggccagaaacggctcccattgcaccgccgtcctgccgccctcgaccgcctacccgtctccgccacttacttaccatttacggcttagcgtcctcatactccccccgtttggggttagtgcccctctggccgcttttatcgcgcccaacgcctgccctccatctataaaacaccgctcgtcctcttcgcagctttgtcgacgcactttcactttgttttcccatctggccccctttccctcggcccccaccaacttgtccgcactggcttgccacctcatgtaccacccctttcatttccaccggggatgccgctcgatccaccgttgagcccgttctggccggcgttgcctgcaacgcgggccgatctcttgcgagttgatgcatcgagatcatgaaactcatgaagataccgtgcaatatgatgctagcttccgcgctaactgctggttatactacgatgatctcgacttgtcctcctgttgcaagcctttctcgccgagcgcctcgcacatttcgcatttcgtacatttcgctggtgttccttgcgcggccaaagaacaatgtctcggaaacactcggcatgcgcgctctgatttgccacagtccgcgcgaggttgcattgtccggcccccaatggtgagagtgcagcctggtccgctcgttcgagggtgcctcggggtaagactgtcgtcatagtccgtttcacttggccgctgttacccccgctgttacccaatcgacgaaaattcggacgactatgccattgtacggactaatagcgaaattgccgcattcttgcctgatctaaattaacgccaagtactgcgtcaccgaggccgacgatggtctattctacagacggcccctgaccacgcgcatagatgggcaactggaaactgggctgacgaccactatggaactaggttacgttggggcgccaccgaggtgtgcggaagcttttgccgacggccttcggtctctgttgagcagccggtgtggctctgcgccttggatgaaacgcttcgggctgaatgatatagagggaattctctgcaccgcttcactggcaattcttatctataaaagagataacaatcctctttgcatggcttatgtagacagagacccatcaatccttccccctctccctttccccttacccctgctctgtatcctatacccccatttctgagtgccccgttcttataggttcgaaatatacctataggattcttctggctatctgccttttcacaatatgtcgagcaccaattttcgcctggaattgtttcgtccatggaatcctttccaagacaaagcttagccattgcgtgatccctctgggacttgtcgctacccaagtccggtctcgatcactgccaccccgctaagttccaattctagcgattatggcccaaaaaagcaaaatattctttgccctaaacctgagcgacacccccttcctgcccgcccgccgacggaagtctgcttagatgggtagaattcggaggtttaaaccactcgaccgggatcggagggcttgggccaaacactttccgctgttagtggtcaggagccctttaacttcgagaacatcttgcaaccacaaaacatagatggtggcgatgatgtcgcttctccaagttttgccgatgatatctattgggaaagagagcgtgaattcctggaattgggattggatggctcggatcctgtcgattttgcccgtcagtatcctcaaagtgttgatcttggaattcctacttagaatggagagcttctaaattttgagaacgtcgatcctgcaatccttgatgaccatgaatctccggttgccgaacaggctgaaataactatggatatcgctagtatcgtaacgcccccggaagaatgccccgcggtgtccattcgccctcagaacaaggtctcaactctctatcgtcgacggaatttaaaggggatggtggacagtgaccgccagcccacaaaaataaagaagggtttgggtacgggaaaaggggatataaggattggctctactcggcctaagaaaagttcgggtcgtcagagcacttctttcactatagtctgtgcccaattctcggcccttttagtcgaagaccgactacaattcctgtcctggctttttgagggtgcgttaactcattgtgcttctgctgttgcttgtccctcaatctaatgtgatggtagaagcgataactgtgtttatacgagcttgaatactgacgcgactgatgtgtagcacgcctcttcaagaaagggactaaagtggtctgcggaggaagatcatcttctaaggaagttaagggacgagtaaaccctcgcttggtcagaggtggttaagcaattttcacgagaatttcctgggcggagcgaggggtcaatcaaagtgtactacagcacaactttgaaaaaaagacggctatcttcccctattgttcttattgcttgacatgattaacataagatattaccggtagaatcgtctggagtagctagaacattatgagtggggatgctcagttgtataaatgcatagtcgaagacatggtggtattgtgggaccggtggtctggaatttgtctggaatttgctcgggtatcataatatttatgttgagattttgtaagatattgaatctagtattcacttcctgttggtgtggtataactgcagcagcgttggtcaaatccgagttttagtacggaggcacataggtttccattttgaaaaataaaatctcgatgcgcctattagctcgaactagaagagggtaccaagacgctggatgcctggactaggtaggatggagaatggggcattaatgatatgaaacgctgggatgtgtattgagagttacgctatagttcttccggtatgtttgttttaccatatataacacgtaggcgttgggatgggtactgatgaccatgtacgacaatacaatgcggagaactcgtggtatttttcccctcatatacgattacataatcccggcggctcagggttggctcagggtatgctcagggtatgctcagggtatgctcagggtaggctcagggttggctcagggtaggctcagggtaagctcagggtaggcttagggtaggctcggagttagctcagggtaggctcagggtaggctcagggtaggctcagggtaggctcagggtaggctcggagttagctcagatttacttcaatgacccaatacctcggtaggtcaatcaatgaccacgcaagcatcaataaagaattatggcattgccatcgcgttcccgctgctcaaaagtcccgtagcaaaaatggaaagagatagagaagaaaaaaatccccttgcgcctttgagattattctattgtagggatgatttacaaatgggtatcatacggctgagcttttgaagctatttagggaacatgggcgggccttccactgtgcaaccgtcgtgggataggatgaaagatgccttcaatactttcgattggtggcggagacgaaaatgggaatcgcgaagaatctggattgtgtcttgatataacgctagagagccttgacactatatatcatgcgaggtgatcattgatgtcgcattgtccaggatagataatcctaagaccagatgtgcggctatccctttaaaagttaccgactgtggtgccggcgagtcagttctctctgttgataagcgtctcatcagagcatgtatgagtttcttgtgattatcattctaatccaatggtggtggaagggattctcttttattcagcacaaggttttttttttttttttttttttcccttttttgagaattgggccaaatacgaagtgaaaaattgatgtcttgatataacgctagagagccttgacactatatatcatgcgaggtgatcattgatgtcgcattgtccaggatagataatcctaagaccagatgtgcggctatccctttaaaagttaccgactgtggtgccggcgagtcagttctctctgttgataagcgtctcatcagagcatgtatgagtttcttgtgattatcattctaatccaatggtggtggaagggattctcttttattcagcacaaggtttttttttttttttttttcccttttgtgagaattgggccaaatacgaagtgacaaattgaaagaaggaacaatgaggaattagcagatgtgatagaattaaaggattgatgttgacttattcaattgttttcaatcttcctactaaaaccccttgggaccgcttactgtagtctctagtctccagcagtaagcagaccccagggtagctgtggagttctcacatatacgtagatgggggtatcattttccggatgaatagtaaatattaagaaatgctacagtcaactctagatacaagatatagcgcgagaaagtaaaagagacaggcttcctcgcatttaggggaacactatgtgggtcccgcaggtcatatccctatttagcccgtatgctttatatatatccttaacagcagctgaggcaattcccgggatgaataatgcaactcccagaatactcttcttgtttactatatatcgagaaatccctttgttagggcttgagtatattggaatttccggtatgtcgtcaacgggcatatattgtgcctttttggccggctggcgtatggtatagcccaagtatcagcgatccgtcacagctctacgaggtatccttagggattcactatgtgtatcctagaatgcatggtcggtactgtggagaatatttcgattgctcctagaacgagagaaacatttcctgggagcttgtcctggatccacaatccgactgtagttattaaggaatctgacggtatattttaggtgcaatagcttatgaggctagtagatattataagtagtgttcctcctacatttaaatctccactagtatatacattgccgtccgttgtttcgaatatacagccagtacactcaactttctgcgttatagtactactatcgtaccacttacaagtaccacggcttatctgtcatatgttgttgtacccggaatttcgaatagtgactatacattttgtataagaggcctagattaatagcgtgacttcttcagcctgttctccaattcctctaatatgtctcttcgcccctgtcagctatgccgatattcgagaattcgatgcagccgtgaagttccttactgttaaacttgcgttaagcgtggtaggtactctttgtgcgtctatgaaacaaaagtgtcagaccaaaaacctgctcttccagagcctcggtcaaagtagtaaaagtaaaagcaggaacgagcatctgacgagtattactttcgacggagagcttttgagccataatccgaacagttttcccggtacgaaacgagtataaatgaagagatgtaatacgtaatggagcctgtaaacgaagaatatatcaagcacatgagttaaagatattctgagcagggcagtttattaccttatgagaccctactaaagggtattgcggctgcgaaagcggagaaagcttcgattttctaaccgaaacatgttgaagatacttctgaacggccgcggagtataccagtgcctcaattaatagagctctatgcgtaaatgatccctccggtaatcaattctaactatgaggaaatatagactatgacgctaactgtcaataaggcttctttgcctctacgcctaaattttgatctgaccatatctgggagatatatttgcggcccacatacggcctattagctcttgttggtattacattatctttttatctctttaatgcttcctgtagatataggagctctgtggaaagttatatgtcgccgccactatgactgggaagagagctttgtcctgtaacacgagcagctttaacagtggctcatcagtgtccgcaatatcttgaccaattctgatgggcttcatacagtaaccttggaagacatagagcgccaaacaagatatattctgttcattcttggggagaatatgtccccccactcgagctttatatttgaatgttttagaagcgaggaacccctataccggccgtttggggtgagggcaagtattgctttgatttgttatgcctttggtggaatctagtccgatgagcttgaaggatatgaagcaaaggaaatttggacctgcgatcaaaactttctgtcgaccatggctttccggcttaaagaatcgctactgtttggcgccgaagtttcagtgaaccatttatagtctatgatactaggtttctagaaggcttttcagtgcgaagaaatctgtgtttccgggatggagttccaaatattaagaatcgaaagcgaattagaagtgctgggatattaccgatgggcatttctagcttttaacccaattcttttaccaaagattctagcctctttgagagaagtgaatgatcttactaccctactatggcactatcagcttattaatatagagagaaacttggacagaagtaagtgaatcgatctttaggctgatatggtgtttaataagagtatagccaatttggccttacgtctcgccaatatatttatatcactggcaccagaacgcttggacgctgcgttctagaatactcgcgagattcagctatcaaaagcggacagagtcgtcgctatggagatgatgtacgtcaagttattcgaagaagtatacaagttgaaccctactagtaagttcttatattttaaattagaaaaaggaatttctaattgttacagaacctactactgtccgtgttttctatgtttcgccgtgaaaatgcgaaggggtatcggaatgcttctcttttaatgaattcaagagttgtatactataaggaatgtgttagaatctgggatttgtgttgaaataatcatttacaaagccttacgctccggaaatgagtctatcgaccttgctcttacgaattaaccttctattgcttcttataaagggcttgaatagaccctttctccgtcctcgtaaatagccattaggatgtataagaattaacagcgccttttatcttaaatgctagcccagtgacatccctagcgtcaaatatgaaattcattcgatgagagcctaccgagctgttatgaactcgaaggaaaggaatcgtataattaatggaaattcaccaagtgccgaatatggttcgtaaaactgcaaccgactatttatataagatatagtacgagaaatccaaagatagagattacctatatttagggagtctatatgtattatataggtccggtatattatatctctccttatattatagttttatttgtgtatgtccctgaaacccttaagtctatatagatgggacagaatggttagcagaattttagttggactggccagccttttatcttggaagcctttttgagaatatcaacttgtaacgagaagtattgttgaaagagtgcactaaatgagatacacgcggtgaataaacgctgataacgaagatataacgttaatttaattagattaaccgtggctttctctaaaatgtgtattgaaagttttctgtgctagtaagagagttgtaatgtttagtaaatgtatagaactattttgtggagcctattaaactttattaattgtagttcttgttcttgtggaaatcgctttcctagattatctttatggtaagctaaagttgaatattcgtttagtgtctggggggatgtatagaccgaatagatcatcgggaaacattatatgttgaagatgtgctatatgttcactatacgtgtactaaagaaagtcatctaagtcaatactgtacgtgtatattaatattgcttcctccctgctgttagctagcctttcaatttaagtatagtaaatgctggaaattctcaattcgtaactcagttccctactttattcttatactcctactttggttctacgtcctatactaactaccagaatgaagaccgttatatccctttttatactggctgcctctgctattattacgcctgttgccggtactttatcccctgggcacttcggccttaagtctatcggcgctactaaccaagagtataataacctctatgtttacgcatactatataggtgtaggcctcaatgatgccgtcctgactaaggatgtgaatgccgctagctccgtttacttgaatggcataaatgccttcttcgatttgaatactgaactgctttggggagttgtagctaccggtgataataaatatatatgtgagtgcctgcccctagaaagttgtgtactaattttgatatgggctaacgaaaattccacagcctgggaacgaatcttgataaacgtaggccaaggaagcaatgtatttttagccgaaggcagtagctttatatggtcggaagccagcggcttcggtggatggctcggtaagaccccgttatcgttgctcttctctagaagcgatctcgtcctgatatttcgtagtctgtaattgttattacaatgcgccctagctgttctatttgaactgtaactacaacgccactatcccctctagctgcagtaagatctaactgaaggccgagtatatcaattagctttagtagaattgggtttgaccgctttctatagccctatttattgcctaatggcttatcttctactagtctgtagcgagttcgagggaaaataatatgaaagcgattactcaaatttgaataaggctagggttggcttctatgctatgcgaattacgctagctaaatgtcaggattctaaatatataaatacattaagagaagtaaaaggtggaatgagaagcactgcgttatatatggttaagtttgactgtctctaccctgggagcacagaagcagctttaagaagcacaaaagtcagtcccttaaaaagccgacttagcttccaaaatcgtgttctcttatattgggtaaccacagttacgttcttatggctagtttaatcagctcctgggttattagttgaggtttataggtctataactgggccttctgagaacgatcgaacgtcttaggtttgtgcggagctctggtgagggtgtcgtgtgaggactctcctcaactcttagaggaagagattgactctaggacttagaagtagggtagggttctaggagtgtagcagcttccaaatccattctatctaaacctaaacttagatttacttaggaacgtggtctgaagattctaggggtaaacttttagttgtacgagatatatagcttctatacctgcttttgaggtttatacggctaatttaataatctctacggcccatttagcctatgtacttaaatgttcctttgtgcttttagctagtcctgaatcttcaaagtcaagtgactctctacttcatagctcaattctctatttcattatcaaaattccagtataaaccataatatatataacctatatcttctaacccctaaaatgaagttcctcgcattcttttttatgctggctacctttgccatcgccgtacccgtcgctatttcgtcctctaagcacttcagaccctcagtgcagtaatctgagtaccttaaaatcaaagaaaatatgattgtaacttacgacatggtgctatacatcgtcatacatgataccggtcttgagaggggccagaatctgcttcgctatgatcatattgatgtcaaccctaaagaccggtggctcgaggatattttgatgttggtagctaagggtggacatttccctatcgcagacgggttcgcggtggatggcagacgaaatgttggcaatttgaaaagaccgttgtattctgtgcggaatgcattcggagggccattgagagtatgatggaataccacaactattattaatactctttggcgccgttaccgagaggaaggtttggtggtctctaagatatggtagcattaatttcagatagctcccgtgatatgcaaggtgggcttttctcggtataaatactctttgcatattattgaggtgtatatgggacagagtagctaagtgccatatatcttaatgcggtcttccatatctcccagttatgtattcgatttgctaccgtttcctaaaaagtatatattagatatcgcacaacagtttgtatatttatactcgtatttaccactgacgtatttgttaagaggaacctcaatccttttaaaatgatactgcagattcctgtaaatgtacactagagatatttctgtggtaatgtatagtctacagatttccagaacgtacgagtgcatcctgatttaatagacttagtgcttacggagcggaccatattgtagttattcaatggtttatataaaataatgtacagtaatcgccgtagacaccttacttgccagtattactagcacaaaagccgggctgacccgatcacggagctgtgtatatcgatgtactgggttccaagtgccaggaaagagactgttaaggaaagaccagtattgtgatgcatgccgtttgtggtgaatcttgaaaataaaaaccctgagttaatgtgttctgtgcgaatctgaaggctgatgaaacctgagggaaaggttcgtataaataagttgcggtctagagggaaatttgaatgggggtgagaaacaaagagtcgcgtcgctaagcttgtgtgacgaccagctcttacagtttactagtggtgaaatgaactaactggtgctggttcttttcaactcaacttcagatataatgttaaagtctatcactagccagccgttgggggtggtaaagctggatacattgcccctgaatgccgttgcttaccagttgtttcagcttcctagtattcaccattggttgaagtctgtaagcgatatatatacgtacttttgaaatattcgcagtagtttagctgtttccctctatgttttacttcttgcattctggctgcttaaaattcatctattgtggacgtctggcaatccagtaccgctgcgatctcgagtattgagctttggaaggctaggtttatcttttaatatggagattgcgggcgctccgaaagaatgtatgaggctttattatcgaatacagattgcctatatgaaatcctttatacttggctcttgaaggctgggtgtgtcaccagaaatcccctcagtattcaaagttagcattgattttttaccagtaatgtaacgttaattatgtagcattcagttcacaggagcgcaatattagccagcagagtaacacaatgaattatgccgtgtaagaaacaaaaagctctaatgtagtaagagaatagtaggaggggtgtggaatgttggatattggtaaagcctacgactaggacgagaatccgcgaatatccgagagtgcgcgctagatctttgtcccttagcaagatttagaaccggggtcgtaaatacaatttaagctagtggagagcagagctgctcttgcaaggaccaccaaatcatcgcttgggcggtgcttccccgccagtaggggttgctactggacattagcgaaacacgataccttgctagtaggactcacatttctcagcgatatgattgattctgccgtctcggtagcggacaaaaactccacagcggtagaatctattggccatcgctctagatcattcacgccaataacgccttgatctttgccaattttctgcatgagccgtatcatgatcgacggaagagccgcaatatatgctatttcagattgctttggcgtgcaatctatataaaggtccaaacttgctgcgaaacgttagccagataatgtaaggatgcggtcattaatagacctatcttgatgatcccgttaatgccaaataatatatcaccacaggccagtgattggtgcgtaaggccaaatgaagataagtagtaggtaccatccaggatctaaaatgtcagaacagcttatcgaagggcatgagggaccaacctggcagataatggatcccaattctgtctcgctaggataaacagatggaaaagcggcaacatgcgccagcgtcagcggcaagtcgtcaactaagaagaacgcgagatcttcgtgcatgtagcattcatgtaaggagagaacgttcctgttttctaggcgtccgaatctgtaaatcaatcttcgagcattctctttcctgtatgtccggatggctaccatgcgagacgggcgagtgcggcgtgtggcaattgtaactttgccagcattctcatacgtaatgactttccgataggtatcccacggtgactcctgtcttacaatcaggacggatgcgatattctccaggccacacaagtggggtaggcaaaggcttttgggaggccccgtgacaaccttcaatctaccgcggcggtgaggttctgttagtttcgtagtggccgccgtatgactctcgcgggtggtgggggccgacatcgaaatagggagctgagattgagctttgatagtgccaaggtcacatatcatattgttatctttcaataggttggataacatgataacaagacagtgttttctcgggtccaaaatgtgcaagaactaagagagaaagtggaattccatttgttttatacgcgcggtgttacgggttcgactctcagctatgataggagatggcagcttcgactgactatcgtaagataaggccgatgagccacagcgcttacatacaaactgttgacggcatatgtatctttttccaactaacaataagctgcacagccatcacgaacatgaatctcgagctaattaaggattccatacgaatcgacaaataaccgcactactcaacataactcaacttcctcggtgggggccgacatcgaaatggggagctgagattgagctttgatagtgccaaggttatatatcatgttgttgtctttcaataggttggatgatatgatgataagacagtgttttctcgggtccaaaatgtgcaagaactaagagagaaagtggaattccatttgttttgtacgcgcggtgttacgggttcgactctcggctgtgataggagatggcagcttcgactgactgtcgtaagatgaggccgatgagccacagcgcttatatataaactgttgacggtatgtgtatctttttctaactgacaataagctgcacagctatcacgaacatgaatctcgagctaattaaggattccatacgaatcgacaaatgaccgtactgcttaatataactcaacttcctcagaatcttgttacccttaacagcgctagggaatgatgtctacggacagattctaggtttcctatgaccgataacgcgccaaaaataaagagacggaagctattaagcgagccagagtctgcggcagcttctttgtaatggcggccttatgtttcgcttatgagtcaacgagcgcatcggatcagatatggtatggttattacaataattggtaggtctatgaagtggcaaacttgccagtgattattgcgttgcacagagttccacttatatggccatgtaatgatcactcgcaacttccatgcgaccagtatctagttgacgctgtaacgaccatgttggccaggtgaagagagataatccggtggacttatttatggctaggtatgcctttggcttggaagctcgcttttcagtagggcgagtcgctctctcaaaattctcggacgaatactggcacagctggtttgggcctcggcgttctagaattacctgtcttactaatactacagtttaatatagtctacaactgatgctataatgagtcacttggattaatatgctgacatttagactcaaagtgacagctaaactgccgagttattaggaccagcagctatgagctgattaacagaatagtacaaatatttcgatacttgtagggcacggagctattgtactattacgaaggaagcgggttgaataatgtaaggagtggctgattttgatattcgaggcaatttgacttgcgaaattgctatttctttattgctatccgcgattggccttgtacgcgctgtctgatttctctaatatattgcattaattggagattaagatgtagctggttttgtatatttctttcttattcctgagcgtagtgacatcgcacaggaaaccgttcaaatcctttgcacctggaagtcccttagtcatgtactgatagatttggagctcaacaggctcttaaatgccgattaacggttgtataacactataattgctcctcaagttcaaatgaccggttatgctatcaaaatatagccgataaggtaaaaagaacggggtgtgtctcagtcatacagccgctccttgtctgcagcagtacacttccgatacttctcttctggctgtgttggtggggaatcagaatcgggaacagcgtctgtttctatctctttccttacgataatctcttcgtacctgctctgaagcaattgggtggcgaggtgtatagtggcctactccctgggggaaatggtgtcggagatcaagatgtggtcggatagcgtttgtaggtattgaattgtcttgttgaccatatccctactaatctttataaggcttgggggtctctttggatatatccgttgtgagcggcccggtatgtgagaggtggagtatgaatgtcggcgtcgcttttgtgggagggttgagggttcggctgctctctttgttgcgttcagagggggcgggtcttggctttcagcctttatggcgcttggagataacgtagatccccttgagctaccaagagaggtactaacggaagtaactgcctctgtagctatagggccagtggactggctaacaggcggttgtaaaacctggcttgtgtggctgcgattcctgtggatgaataggccaacgacctgacggaagttgttagctgattcattgccttcatgaaatagatttgttagccgatggattccttgagaaggggatctaaaataacgataccagttttgcctgtacgtccattgtgaccttctgtgtctggggtattggacttctttggaacctgtgataggttgtgatctatgattggttggcttcgctggtgatggtgttgtactggcaagctattggagcaaaagaaggacaagagagcatcaaccgtgggataattatggccttttaaatgtttggggctgaagtggtcatgcccaccatatccacagttaagaatttcggggttattattatcaccgccgactcctaggagaactatggatgtcaatatgtggccacaatagtggtacgtacacacccacgatcgaatcaaggatgttttaatccagttgccgtatccacatggtgctcgagcctccaattgattcgaagcatattccgaggagcaacatggctgccaaatcattgttgctcatagggcgtgtggaagggagtcccatttctcacgacttgggggttgatccgactggccgagggtgttttgtgcttccaggagctctggagactttaacttctttggtcataattcgttggtactgtgccgacatgatagtattttttgagtgttctcattcaagcacctttggcaatgtacgggtggtgaatgatgtcagaaagttgaatcaacgttcacaaagttgaacataaaacacccttgaacaccagcagcatgtgagttttccgcctgtagaagatatccatctgagccatgttgtttctttgccaatactgggacctgattaagttttccactcgaagctcgtttcctaatcggccgcgttggttcacctaacggcgacggtttaccatggcttagagacgcatcctacactggctgttaaacacaagctcaacaaaagagataaaaaagagatgactacatctttctggggactgttgggtaggtttgcaatcaacagcaaaccgcagtttcctcgagtacagcagagtgatatatcgcaaacagaccaaggcaaactacgtcggtatcagacgttcaaatttgaaagatgtcacgcgtaaacacgacacatattaaggaggttaataatatagaaagagacgctgtccgtggttaaaacgggcagatgtagattgccaccacgttgagcgatttgattgcaaatccagcgttatgtagaaggaatcttttttttgtgcggtgttgctttcttttcaacagttgatggaagtggtttaccacgctcaacgcacgattttgagaggaatgattccaggtcgagacatgactatgggccacaaggtatccaaacaccatttcaacgtcgatcgaatcatctcaacgcctatcaacgaggcagtgattatcgctaccatctgcgcaactggttccatcgagagacgtagcggaaaaaatataaaaggggccggatgccccaaaaaatcaggacttcggtcctcacactttgatgcatcatagtgtccctttcttgtctgcaggcttgggagtctccgtggccatggctgtcgctgctttgagccccgcgacgttagaaaggtgttttgcaggataaggtctgcgttaaaaccaataccagagcctactatggtctacaagcggtgccatattggtttatctgaatcaatatgcggacatttagacacagaatgaccgccaaacggtcgagttgtaagaaccagcagtcatgagccgattaacagaacggcaaaaatgttccagttcttgtagataacacagcacaaaaaattacatctctacgagcgaagcggattgaataacccaaagagtggctggttttgatacacacacacacacacacacacacacacacacaatttattaacgcccggcggctaagccgaaagggcaactatctctgatctactatacatgtcataatatatatagtactgtgtctcctcagagcccatacataaagccttgcaatatatgtcatctcagatgtccgttagtaatttttgacggcatacagtgcgtcccgaaactggtgccaccgctacactctttcgttgtttctcgaatcacaatgccaagacccgctagtctctgtttgggaatttttccggagtacccctgtcagttgggcgtgtattgcttcttacgtaggttactactttcaagtatgtatttgcgtgtgaatcaatacgtctcacccaccttcaaaataaccacccgacggagggtatcttaacgatcaatcaccagtggttgaatcaagatgaccccaaacctagctccctcaaagcaagatcttatttatgacatgatacacggtggggagctgtccataccgcagatggcgcaggctgctggctgcaaataagagtaccatcctgagaatctcttccaatatacggatgtttggcagcgtcaaagcaccgcttaataaaggtggacgacaacgtagcatcactccagtcatgcttgaggcgttgtgcgatcacctgctcgaaaagcccaccttgtacctcgacgggatggcgggggggcgagccagcacgctcgcttctttccaagataatcggtcatacagctgccgggtgtgtttgcctgggagtgctgcatcaactcgttttgcgtgttccctacgttcgctggaaggtcattgctgtggactgcttgggaccgtgcgatattcagtgtagttgacttcattctcgggacgctttcttgcgggagagcatcttcttgtgtcgcggatctggcctgttctttagccagaacgcgcagtttattgtcttcgctcgtagagatccaccggatattgatctggtttccatttctccgtagctttctcatcaacttgtatagttggcagacgaattcctggcctgactgttgtcgaggattccttagtgtcagagccgccgctttgttgctcgtgagcagcgtaatcctgtaatctttcagtccaactaccatgttcaatgcatgtaccatcgctgctagctccgcagagaacggattttgctctgttcttgcacccaatgtaacggaaagggtcttcagtttcagttttcgataccgaggtggctgcctctcgatcgccaccccaaatccgaccagctcgttccgtgccgaactgctggttgcgatctgcactaacccgcccggtacggtcggtgactgcggagtttcttcaacgccatcctgtacgcgtgcttcccatggtgccaatgtgaacggattgatggtttccagtctttccatctcaatgttcttcagcgcgtctgctacttgatacaacggcgaacgatggtatcttctgaatttcttgatccgtgctgtattcctgcggagagggttggtttctggcagggtatgtatgtccgtccacatcttcacggctcgtctccagaagcggtgttgaacagtggcaaggtgggcctccgcctctgctacactggtcgcaactgtgaggaatgttcttacaatcgcctgcgctcctaccctttggacgcggttgatcgaccccatggccttatctttgcacgcgtgcatccagacattagacgcgtagtccacgaccggcgccaccgtcgatgtaaatagctgccgcgctgtcgctggggataaaccccgaagtcgtcgaagctccatcgcggcctccaggcccttggatgctgccctcgcaatatgttccttgtacttgagtttcgtgtccatgaggacgcccaagatcttgacaatgtaaagtagtgaggttctgatgatgcaaccacttccaagcattcaaaaagctctcttccagcccataaagtccgaaacgattcgactgaataccttggaagaaggcaatcttttataccgtcaacatggacgctcataacttagcacaaattgctgcaatctcgtcgtcattttggctgtcgggtatgtgtctatcttaagaaaatacagaatactaagtatgtcaataacacaggcgaaatattcacctactcttggggcgtagtgcccgcagtcttggaggcctgttcaacctcccagcattttatcataagggacattcgctagggccgcctttcgccatcctgggagcagggggctttgtatggttggctttggagtcgggttgttggttgtactggcgggctgcaattctcgatgttggtatcgttccatacaccttcgctttcgtgatacaaacaaactcaagcatattcgagattgcgaatgtgaaagactcgtcggaaaagcccgccagtgaggagaaccggctggctccactgctgaacagatgggcgtgtcttaatactgttcgctcgcttttcccattggccggtggtattttgggattggtagcagccttgtactaatcttgttgacttcctatgctggattgaacaaccgagtcttgtttcgttagagacaacctgccataccgctcacatcaaaatgccaacaatgtcccatgtccataattatcttagcatatcatgcatagtatgtgtcgtattggctttctgcatccaggaaaacagtgtcacaatccccttgtccacgggagtaaggccctcgattccacgcccagtgtcgaaatcgtggacatacaaaatgacgcgcaagcgctacccgtccactttctagatccagggaccgctgacatggtgtcccgacggggcgcttttggctggctgtacttgggtgacccaaccacccattttccacgcgcagtatggacggtatccctcggatagcatatctgccgggccatctggggggtatcatgtagctagctttcatactagatagcaagagcatccccagtctcgcgaacgacggcgtgggccccatggtcagcacatttattcttcactttctatagtatatgacgaactgagagagtggtcaaataccatgggccgtaaaagctgtacctcacttcacttcgattgttactcatctacagtgtgttgagaatcaagcattctccaatacaccggtggatcaatgccggtttcagaagccagcttgcaccttccagaacattgcggaattcaatccttggacttggtaaactctactactcacactctaggattgtgcaatgccattattatggcgtgcatgctactaagcttagcgaaaataaaagtcggattattcctgtattctagacttaagacttatacacatttccaatcataccatatacgttcttgaatctcattgagttcacacctctggttacacgtagtattcatccgtcttgtaatactttaacagagtgagctgcacatgctcttaattgatcccggatagatggaacaggagagcatgtcagaacccaccctttgaccatccagtggacaattaaatacaaattgagcccgtgctctactctagcagcccattttccctacccctcttgcccccaagttggaccgttatgccgagagctcgacggagatgaccccgattaggggccagtcctgtagttgtgcgtgattctcacccggcttttcaacctacttgttgttcaatcatccttctcacctgggcgacacccacccgactattggccgcacatgagccacacgccggtgagttagtagttgggtgggtgaccaccagcgaatcctcactgttgtatgtttttcgtttttgtatgaaaagagatacacgcttatgttatcctgaacgaaccttggcacacgggaggttcgcaacccagaaataggatcgtcttcttacttaagaatttatatactgaagaggggacccctgaggggcaccgacaaccctgcctgcgaaacaggtgtgagaacagagtcatcaatgggagtagtagggtgctagagaggagaacaccatggggtgactaccgagaagagaggcggaaaggtgtctgcgttgctatctaggcctcgggagtgcttttatgtcacatagccgcttagtcattctgctctggaaacccccactgcaatacatacttcaatatatatatcacgcgataatgctaactacgttctatagtttatatagtatcgctatagttatacccgaacccactactaagtacgaggggacctaaaacatattttaagtactatgcgtagactaggcccgcggctgtactaactcaccattatgacccctagattgcttgagctagacttattgtactgggcgatcagtaagtagttctttgtgcgccgtggcttaggtctgttcctataaagcgagtcgaaaatcaatagccgaatcctcatctcgccatcacctttaagccagaagatagtgggccagaaggtagtgtgcccttaagtgcaacatattgccgatacctcctgtacagagatctgcatcacgtcttctaagggaaaacccttacgtcatgtcatgtctctatcaatgttcttgcactagcagggtagcttaccatacatcttgcgagccaatcaaaacattaacggcgctacagatgaggaatatcacaaacaaatggttttcctctgtctatctttggccgcgatctaaaaataaaaccagaataaataaatcaaaatcagataagactgacaaaaatgattcggcgacaagcggggtagtctaaagacagaaacttgtgataatcttaattcttggtatatagcaaaaatatttctacactctggtgtgcaaggtctattttctctcgttgaatctttcgagacaaaacgtaggattttctctgtgaccattgaaatatcaaactcaacctccaacgccgcgggacctcctctggcgactgatcatatgaggctaatgagagccacgaacctttggggggcccacataccaatcatgcaccggttatcccttcgcattatgacatggcttaagatcattccagtggcgcaagaccatgcgctgatcttagcttgaaataacccgccaatgaagtcgacatctgaccattgatgggactggaaagttcgccagtcggcctttctcaatcaagaatactaacgcatcttatagtgctatccagagggaaatggaaaacgaatcagcagatgtgaattgctacctacaatgtctaaaactacattttcataggtcggttgagaggaatggcccgagtaacaatcaaagtatgctaaaataccttcgcagaaggtgaaacgaccctaacattagtgtagttacatcgcatattagttccgtttcccgaaatatcattttcctccgactaaaatatatatatagccttctatcctgtctaaacaacagggtaaatattttacaattctgcgtactggcaatatccactgatgtcttcattaatctttgaaaagtctctccaatgtcaacctcacgattttttccggtcccaaccgcctatagggccttttcgcaatcataatgcatgctaccttgctatccctggtactagtcaccccaatagcgggtgcgatgaagccgctgcaatgaagctactatatccaaccaagcactcaactaaaagcaaggtagaggtgaaaagaaggaggcacctcattgcaaaagtcgagattatttcgcaaattctcgtcgcaaaagcgaaggaagcagccgaaagaaaccaccagaaccgtcaagccttgcggacgaaactagcaccagaactcaatcaacgcaaacggagtaaccagttgtcctccagcgacagatctggtatgcgtgatatggatgaaaattttgaggttctatctccacgagatgtcagatccttctcattcatcctcgaaccaaccacgaagaagcggttttgtcgaaagaagatcgaactctggttgccgaaaaacccacacgagataacgatggacttctcccgtccaggaatggcacttcttagaccacagtctttgacatatgctacttctgggcccgctaagcagagcttatcatctaagaaatcctcaactaccaaaaagtctgttttgaacgcaatcgcggagccacgcatttcaaccactctgttcattggtgaaaccacacagtctggttaccagggcaagaaaaagcaagcggatttgggtttgtgttgggtgaccggaaggcggtcacccatgtagacccagatcaccatcagatagttcggctccctcttcctctctctctctcccttgtccacttttatcttagcgaatcgacaatagttgttttccccttttcaggcacaacgtagtcagatacgccattaggttatgagcacttgtctctagctagcaaggaccgctagcaacctccaaccctaagtctctttcctggaccccacttcccggcgcttaacccgcacaacgcgcgtttctcgccaatcggatttaatcctcgcaagcctcaatcaacaacagaattggcaaaccagctctcagcatggctgatagcggtgtcgactctggggatgacaacccgaataatcagtcacaatttttgccatcaggcaataacaacgcgtctcgggagataggaaacacctctcaaccccaggccaacacaatgtcatcgggtaacggatacaacgagaagaatcaggccactaacttacctgacatctcggctgcgaaaatgcagaaagtcaaagcactcgagtacaattccagaaatcctcgtggatgggcgatccctgtgaaattcgctctcgcgccattgagactggaatatgtcattgacagcagcatgcctcgccccactgtgggtgacccgaaatttgacagatgggagtactggtcacgcacagtggctagctggctgtacgttcaggttgacgatacactccaagaacgaatccagaatctctcgtacctcccggaattcgccgacacaatgttcgatgaaatcatgttaatggtgcaaggctctgacaaggccgaaaatgcgctaaacgaaacaaaaaagttcgacgaaatgaaacgagcggacttcaacactgcgaaggaattcattgcggaataccagaaacaataccacgttctttcgcgattcaaaattcaaccacacccttttcacgcactatcacaagttctacggcaattggataaagaaatatccaaggttcaattcatcatcgaggagattagtaatatcgaacctaagaaaatcacactcgaaaagatggaccaatattgcaagagcctccaggcagtttccgacagagaagggactgctaacgcagcccagtcctcgaggggacggggtaacaaccgcggcggaggacgcggaggacgaggtggtaagaggggcggcaaaggaggtaacagcgaagcctcctcaagccaagacaacaaatcttcgaaggatgactcaagtacatccaacgaacccaagaagaagaagacccttcgcaaccaaccacctcctggtaaagatatccatgagtatgtcaaggaaaagaaggaaggaacacaaagggatgagagcgggatgtgtgcctactgcggtttcgggccacacaaagctcaaaagtgttcctatctgtcagaagatccacccgcacactggacacacagcccacacgtatggaattactcgatcgcactgcgaagcgaggggcgaagcaatatggccataacggcaacagctcgtcacacagatagtttcaacagctggctgattgacaccggatcagacaaaacactcacccacgacttcgaagatttctacacataccaggaggacagcccggaatcggcatacgcctaccgggactactccggcaacagagtggtaactgaaggacacggagaggtccttgtcaaagcaggtctcgaagacggaacaacatacaccttcctgacaaaaggctactacagcccaaggggtcacggcaaattgttcggcatgcagaaactcctggaagaacaggatatctcgtatgacacaagaactaagcgacttacagacggcactggaaaaaccgttggagttgcaaacacatcactcggggttccgtacctcatcggtcctaaagaagacgattcacacgaagaagattcatcctacgggtcggacagtgacgaagaaacaggattagtcaataaaatttctgcctttgaggcgcatcgacgctttggacacgctggaaaagccaaacttacttcaacgctgaaacaagcacaagagcttgacgacgaagaacagtatggaacagaatacttcgactgtgaagcatgttttcaaggtaaatccaagaaacagatttctcgtgagccgcaatttcgggttcaggacgtggcatggaaatttcatgtagacacgcagcctatgaaacctgagggcccgaacggtgaaaagtactggatgcctatcctcgacgacgcaacaagatatctcgaggggccgactctcacgaacaaaggtgaagcatttgtcaagcttcaagcattttgcgaaaaaatcaaactccgaactgggcgctaccccggaatatggagactcgatggtggaacagaatttaagaacttcatcacttggggcacaaaaaagggaatgactttcgaagttacaccaccctacacggcagagcccaacggcgcggtagaacgcttcggcggatacgtcaacgacattcagagaacgatgatcatcgatactaagctacctgaggagctgtggccctacgcagtagaaactgcaatctacaccatcaacagattaaccaacccaaagtctcaaacatcgccactcaaacactggcgcacagaactcggaatcgacaacccagatccgtcactgaagcacctcagaccatggggaacaaccgtctacgttcatattccgaaggagaagagagtacaggcacgcaaagccgctccaagatcttggaaaggacacctcatgggttatgagggggataacggacatattctaaaaatctggaatccggaaactaggaagattacaatctcgagggacgtcagctttcctcaaccaggggacgaagatcaggagggaggagtaccggtagcgccaaagccatcgaaacccccaggagatgacgacacaaacgaaatttccatcccgctgatcgacgcagccagaaccgaaccaaggacagagattgtaacagtctacagacaggatccagtaaccccgtcaacaattcacttgcccacaattcaaggcagcgtttcaaccataccagagaccccggtaatgcctcgtcgacagaggctactccctgcaccaaggcacacaagatcgatccttgggagacttcagagagggacaccaattcccaaaaacacagaacagttaacagcgcaaagagtcaaccagactcttactccaatccaagaggagacacagactgttcacagtgagaatgcaacccctcagacggagcaaattacaatgacagaaaagctagcagagaggaaagccaacttccagagaagacttgaggaactcacagctagaatcaacgcagaagagatggacatgctggaagtacaccagtacgcagactcgattgaacaggacttgatcagggaaaccagctccccacgagagtcaactccaagggaagacactccgtccccagaacagacaaggacagagtaccagtatcctttctcttcaccaactcaacagactccagaacgcagtgaacaacagatagctacgcaacaaacatcaacgcaggacacttatgaagcgcctcggcacgctgcgcaactgacgcagacagnnnnnnnnnnnnnnnnnnnnnnnnnnnnnnnnnnnnnnnnnnnnnnnnnnnnnnnnnnnnnnnnnnnnnnnnnnnnnnnnnnnnnnnnnnnnnnnnnnnnnnnnnnnnnnnnnnnnnnnnnnnnnnnnnnnnnnnnnnnnnnnnnnnnnnnnnnnnnnnnnnnnnnnnnnnnnnnnnnnnnnnnnnnnnnnnnnnnnnnnnnnnnnnnnnnnnnnnnnnnnnnnnnnnnnnnnnnnnnnnnnnnnnnnnnnnnnnnnnnnnnnnnnnnnnnnnnnnnnnnnnnnnnnnnnnnnnnnnnnnnnnnnnnnnnnnnnnnnnnnnnnnnnnnnnnnnnnnnnnnnnnnnnnnnnnnnnnnnnnnnnnnnnnnnnnnnnnnnnnnnnnnnnnnnnnnnnnnnnnnnnnnnnnnnnnnnnnnnnnnnnnnnnnnnnnnnnnnnnnnnnnnnnnnnnnnnnnnnnnnnnnnnnnnnnnnnnnnnnnnnnnnnnnnnnnnnnnnnnnnnnnnnnnnnnnnnnnnnnnnnnnnnnnnnnnnnnnnnnnnnnnnnnnnnnnnnnnnnnnnnnnnnnnnnnnnnnnnnnnnnnnnnnnnnnnnnnnnnnnnnnnnnnnnnnnnnnnnnnnnnnnnnnnnnnnnnnnnnnnnnnnnnnnnnnnnnnnnnnnnnnnnnnnnnnnnnnnnnnnnnnnnnnnnnnnnnnnnnnnnnnnnnnnnnnnnnnnnnnnnnnnnnnnnnnnnnnnnnnnnnnnnnnnnnnnnnnnnnnnnnnnnnnnnnnnnnnnnnnnnnnnnnnnnnnnnnnnnnnnnnnnnnnnnnnnnnnnnnnnnnnnnnnnnnnnnnnnnnnnnnnnnnnnnnnnnnnnnnnnnnnnnnnnnnnnnnnnnnnnnnnnnnnnnnnnnnnnnnnnnnnnnnnnnnnnnnnnnnnnnnnnnnnnnnnnnnnnnnnnnnnnnnnnnnnnnnnnnnnnnnnnnnnnnnnnnnnnnnnnnnnnnnnnnnnnnnnnnnnnnnnnnnnnnnnnnnnnnataagaccagacatcagattcgccgtcacacgcctacaacacagactagcaacaccgactttttctgatctcgaggcaatgagacacgtcgtcaagtacctcagacacaaccctaagacaggactgatctttggaaagtcggacgaactacaattcatagcattcacagacgcatcacacgcagactggacagactccaaatcaaccgaaggatgtatctggttctttgcgggagtcccagtagcttggtctactaaaaagcagacgatcacagcgaactccacaacaatagcagaatggtgtgcgctcgaccagccggcccgggatgctatgtggcttgctaaggttgcagactcactgagcctgccaagacccgatcccacagttatctacaccgacaacatcaattcacagttgctactgacaaagaagggaggcaagtctgctaccagatggctggcactccgatggttcttcgtgaaggacgccgtggcccaaggacacataaacatcctgagggttgacacaaagcagaacgcggcggacgggtttacgaaggcgcttcccaaagagcaattccgagctttcttgaagcttattgggatgacttaattcaaaggaaaatttggggttttttacgactaccacgattacgacattttaagatcatcattttcaaaacaggagatatgagatctgtaggggggatgttgggtgaccggaaggcggtcacccatgtggacccagatcaccatcagatagttcggctccctcttcctctctctctctcccttgtccacttttatcttagcgaatcgacaatagttgttttccccttttcaggcacaacgtagtcagatacgccattagtttgaacgaggtcaatccaattcaaaaattcaaaccttacgtgtcaaaaaccatcatccgaaacctatctgagagtcttagggaacttcttaccaagcctctctcgaaaagcgatttgaaattcaagggttcgatatatgtcttttggcaacaaggcaattttggatacctcaagattggacgctcggcaaatgttcgtcgccgtttcaaggaatggtctgatcaatgtaagaaggatatgggaattcactttccagacttcacgcgagagacaagtgatggcgagcgagttttggaagaggtcgcccatatttgtcgtgtcgaggctctggttcatctagaactgttggagcacagaaaaatcgaagagaaatgcccaggctgctctcggaaccacatagagtggtttcaagtctcagatgaaaaggcaatagccgttgcacagaagtggatggcttggatgagaacggaaccgtatgagaatcgaggaacggaaggtgaagaaaaatgggtgctaaaagccagagaaatggagcgactaggagagcttagtcaacctttatttcccaaattggccccagaatctcaggttcgggaagaaagactggcttctcttcgtcctagggcttcctcttcaaccccatggcgagatggaaagaacaaattgggacggagatcaatttagctgatacttcacaatttatacttattgaacccccgattatactgtgctaattttatatgtaagattagcgggttttccaatgcttttgttattaaatagtatatatattatctctctctattagctgccaagtttgtcttctctaaccatgagatattaaaaaccatgttccgcgttgatataagaaaccaatatatataggaggcatccttctactaagagtaaaagcctagtcattagtacgagttttgtgccaacgcatagttgcattcttcagcgcatgcgtgtggcaaagcaataggagccgtcatatcgtgagtattaggtacctatatattaaagcacgacggcagatgaagcggagttttgtttgatgggagctagatatcgccttccttcgactagacaaaaactcttgctcaacgcgaattttgaaatgccaccattttctatattacttttctacctactaacatgttttaaagaacccaagattcagagaatcatttagtaaatgatcttactgcctataattctagaagaaaaattaaagatcgcgctattagcgggtgaatttgacattcctaaatgactcctacccgccaggtcaaattatcgggctcctcgttcgacgcgctacccaaccaattcaattttaaatacgaaatctacatcgctagtagtaagtagaacacctgcatcaccttattactaagtgatttaggtatcccgatacacgttgtggtatcgggatacctatttgcatatcgggactagtatccggaaactaagtgacaagaatatggaggtataactgatttcgaaaactactgtactacagtacttgatttgttactcttaaccctaccgttgccgagctggcctatacagaatattttcttgatttaaggattcagtgaggcctagaatcagtgccagatgatatatggtcgcagcttccatgctcccaggcacattattgattgccatcggaagtcgactgcatggccctggcaacaactaggttcgagaggatgcgggagcatgtcaaagttatctctcgatacaattataagcaagcaatttacgccattcgaagagacactactttaactacgggcatagcaatatatacaagatacaacgaaactatcttctggcctatcattcttaagtacgccgcgctgatcgacctagcaacgctactacccgccaagggcccagctaatagattcactatagcggaaaaagctgctacaaagaaattcatggaggacagtgggtatagctttgggtatagaaaaccagcgacagtaccactttttctagaaaaacatatacaatatgcgtaaggctggcgtttacaaaattgtcttctagacataagcacttgacgtgcatatctaacgctatgaccatctaggcgcagaggtcacctgactcaacggtaaggatgagacataagccgtgttactatcccacccacgactctatagttctcagctattatatattcccttacagtgctgtattaaatacatacgaccatagggtgtggaaaatagggcttcccgtccgctcagccgtactcaagccacacgccggtgagttagtagttgggtgggtgaccaccagcgaatcctcactgttgtatgtttttttcttttttgctccaaatttggactgtagtagccggtagtaaggaatgtgtacggtagaagtcctcaaaactgtgagtaggtgttttatcagacccagtgtcgagtaaccagctgttgaatctgtccgaggggtgagctgccgctgtgatggccatgtaactctctccctcacttcgcagcgcgatggagtaattccagacatgggggctgctggtccaatgggtgggtggcacctctgccaggtaggaacaggctttggctttatgaggtccgaaaccgcagtaggcgcacattccactttcgtccttttgtggcgcgtccttcttttcttttacatattcatgaatgtccttgccgggaggaggttggttccgtagggttctctttttcctaggctcgttggatgtgttcgactcgtctttcgaaggttttgttatcttgagtcgaggaggtatcactgttacctccttttccacctctcctgcctcctcttcctccacgtcctcctccgcgattgtttccccgtcctcgtgaggattaggccgcattgatagttccttctctgtcatggaatggcctatgtgtcgggtagaaattgccgcaagatcagagattgtacgaacgtgggcagcatgaacttcattcatagagtacggagtagtctcattctggagatattcacatgatacgtgtgggatactgtcagtatcgaacccgacaccatcaaccctcttgagtgtatcaccgagtcattatttgatttatcatattgcagtgatgtctccaggcttttcaattgaatcgtttgtagtcaacaacctcctaaacaacgactgcggaagagttgaagacagtatctctgttaaagatcatgtagttcgacatgtaccttgcgagtccttgacgtcctttctaggtggctaattcttcgagtctcctccccacatcatcacctgcacagcttgagctctttgtaaacccaagaatatcatctacagcaagatgaacttgctcgagcagtctatcaccgctaaatacaagttctagtcagccctgcgtacctcgacttaagtaattaccattggggaactcacgatctcgcttcccggtcgtggaaaacattcctccaatgagcatacatccatacaatgggcaaatatgaagcgcaagttgccccatgggtgatgttcagcagtctttcggtcgtttgcattgacttggttgacagtgcactgtgccgtcccaatgaaaaactcgcgggtagaatggataatcggaccgatggggatgttcatgtattctagcgtacgaggtggctttcatagtatgtgattctttttctgggtctatgagctggtaggacttcatctggcttcttgggtgaaacttgtgatatttgacaggtgcgtagggttgatgcagtccttcgagaatgttatcggcatgtctgttgatccgtaatgtaacctcgtatccgcgtgagttttggtcatcttgtacctggtgtaacgcgttgtcgttgatggtcacagcctagtcgattagaactgctagacagagccgtaaagctatatccccatgaagcctaccgaagccaaattcagctgtagattgggttgggagtttaggattctgtgcctaatgatggtgttgtggcacagccgaaggagggaactggaaacaccctgaggacgcagtgttatccaaaaggccttggtctggcggttagttttcatggtgaagacagttcgtatttcaaggtgtttcatcaactcacttttgagattctgctagtagaataattttctgtctataatatatagaaatatagaaatatgtcacatattcagatcccttatgagaacccgacaagaaagttaagagggaaggacgattaattctctacagacaaacagaagctacttaaatagctagtggaagcccgacaaatcaggcatcaggtagatgcgctcttaaacacaaacaattgtctatgaggtcactgggtagacacctaatataacgcttttcggatgactttggctctaatgaaaccaatatatcgatagtccgactaaagacacttaactcaatacttggaagtaacacaattcaaaagaccaaagaggcttattttcaattatcaagcaacggagccacctctaaccagaagtaatgtcttatgtgaatgagaaaaaggcaacctccactaaacacaaactccagcgcaaaataagcgagcaaatggacaagtgatgctaaataaccaccttgaaagaaaaaaggcgtcacgaaggcaaataaacgaaagtcgtggacctcataaacttcagcccgcaaaaacctgtctgtacctatggtctcgctcgaacgcatgcgagtcatctgcgaagctcgaaccctaacctatcttcatcattcggagaacagagtaataggctccggacagaccgacacactcgcgtcggggaatcggttcttcagcgtgaccatcagggccggcttatcccacaggaaataggctttctggtcagcccagttggtactctctgggcgcagggtgatatcgaagtggtagaggagcttgcagagaatgagtcggatttcgcagtttgctagactattccaagtgagaacacgttagtattgagtgaaatggtgcaatgcgtatacatggaagaaacgcactgttttccaaggcagacgcgtggaccgagactgaatggctgcaggacatctttcttatcgtccgcaaagatcgggtcagatcccagccaacgctctggcatgaacttatccgggaaggcgaagttggactcggagtggtaggaggcgtagtggtggcatgccacggctgtctgatcgggattagtacgcaggctccaaccgtaaaaaagtgaattgaagcctatacatacatcttcagggaggaaatggccgttcacgactgctccgccttgcggtacaatgcgcgacagacttgtcacgaagggcggatagatacgcagcgactcctcgataacagcagtcatgtacttcagttcttccacggcgcggaaggtcatataactgtcctgtttgaaagtcgagcggacctcggcgacgagttggctcatgacgtgtggagctgtacacaggtaaaagatacagccggatagtagggttgcggatgtctcgctacctgccacgatgagactggtattgggtagcgttagcacaatataaacagaagagaagaaagatgaaagcattcgacaatgaaaacactcacataaaaccattagaatgaatctcagcccgagtcataatacgctcgctgtcacgatactggcccttcttctcgctaagtccatgctggagaatagcagacataaaatccggacgggctatattcgactccaagcgccggtcgaccttgcgcgcactcagatcaaagtgttcctggccgacgcgcttgacttcccgcggaatgaataaatccaggaagcccttgagcatggggaactggttggcagctccaataaaagcaatagccttcatggagctgaagatcaacttaatccacgggtgaagctggctgtccttcaggcagtcgaaggactcgccgaacatcaggtcaccggtgatatcaaaagtggtaaagttcatccaacttttgatatcaacgatggacgccccttgccgaatctgtgaccgcagtttggtgatcaaggtatcgacatagcctgtgataagaccttcttgatctctcaatgccttctcagagaaggcgtgggctagcagccgtttctgtcttgcgtgggtcgcattatccaccgcacagaccaaatgatcgaccccattcgccggggctacatattggctccgattcttagggaaacaaccgccaggtctggcaccgtagatatcgcgaaaggcctgtgctgtgttgaaggccaattcattgggtccaatgcgcagaattggaccgtactgcttgtgcagcgccagaatatctaggtgattacggccacggagaatggagacatttgatgggatgcgagatatcgcccatagctttggaccggggaagtggcgcaggggcgaccagcaaaaagtgtagatgatgctgtaggtgacccagagcaggagctgttcggtgctgattagcgttggtttctctgaaaacgcctgtagagggcattgctcaaagctgttgtgtttccccggggagatgtagggattcttttcttgcatgaaacaaacgagggttgggagtacgagttgatgcaacttaccaggcatcctgcagccgcgccccaaaagccagggcctgaggttgcccaagacataagatttgaggtgaaagaggtgatagagatccacagggtcatgcactgccctgaaaccatattcagttcagggtcatctggtttgttttctggatagaagtgggatttggtaaatgtttctcctttttttcatgatttcaaatagtcattgggcactgaaccaaggccaaagaaaaagagaaacgaacaaagaaaggcagagttgcaccagtcgaatgcggttagtgcaagatgcaaaggtgaaagatcacatcgggagttggtgaaagaacccggattcccagccatatcaaacctatctacactcttgtttggactccgaaaatcatcgggaaccctagtcaaattgcagattcgactgggaccaacacggcttccgaccgtaaacgacatgcaatttgcagtacgtatgcaccgcgggattcttgagatctttgcgcacccccgctaggaaaacctgggtatcattattcgaccatcccagtacacgagtgaaaagagccaacgagtaggattccaccgccatgagaagggagcattggttgtaccgaccaatctccttttgcacagggtccctagcccaaacactcgatggaacctagaaaaaaagacagtcagtcgcgataaaacaggcaaacaaaaatcaaaagccaatcagacaaacgagcgggggatggtcgcaccttgtacacctcatctcgaacatcttcaaaaccagcctcaaccagccgctgtcggtgaccttcggcgatattcataggtcggtgaaatgcctcgctggcctgagttagtcgttcaagaaactcacacaacgccggcgcaagacggatcgaatcatcgtccgacttgagcatgacttcaaactcctgcaactcaacccatccaccaggacgcagatgctcgtagctctggcgcatcaaccgtggccagtcggcaatagcaccgcctaaatcccgggcatggatgaagtcaaatggccgacttgggctgtacagccattgcgactcggcatcgtccaccacaaatcggaggtttggtgggacccatgatggctggatgggacttagatcggtgcctgttatctcggcactggggaagctgtctgcgaagtcgatggcccagattccggtgccggtgccaatatccagagcgcgttgaatattactatccagtggtgctcggaagagccggccatttagtacgaggttccgtacgtggtgaaggagatcttgtcgatcttgttctggttcgtcatttggaaggacgtagtggccttcgcggtatgagtgataccgtcttccattctcataagcgtagtttttcacatcggatagcagtgaggctgtatagctggatgtgttgtctgattctccatcaaagactgagtctgaatccccatttgttgatgctgcagatgatgtgtctccattgtcatcattatcgtctggcgataaggagtttacgggtagagatggcgcggaaccactgtaatccacttcagaaatggacacggttgttgcgctcattggagccggcggcaaagaatgcggtgttggcagatcccacgttgagctcaactaatcaatttcagtggctgatgtagttaatccaggcaagggagtcaggtactcctcgtcactgtcctcggaactttcctccggaattcgtgccagtccaggagacgggagaatcccttcttcgcgatgattgatatcggcctcaagcgcagagtcgtccaacaatggcagctcaggtatatccggcaagccagatgcacgaattaccggcgctcgaattgaaggagcaggcgacaatcgcctgactgaagcttcctccattgcagactccatttgatcaaaagtccgttttaacgggatgcaagggacaggtagtagcccagcctccggagctggaattcctgatatcattttagtggaattcggcacggcgtcagacgacacgattggcgaggaatcacgattccctgtcaaggctaggtacgtgtgagaggacaatagatcggtacccagatcaattctcgtgttgcgtcgccggtcgtccaagcacatggggtaaatacaaaggaaatcaatcatgtcaagaggaggtagccctgggccaatctatacagtaaagatatctgaccacagtaagcaatggaatacttagaagatcattggggagaagggatcagataaatagcaagtttattttagcaaagagcttcacttttcatgagattgtctcctttcccatggtatcacaaggaatatcaaaagggaaagtgccggagtatatggccaattctaatatcggcaggggtttacatagtacgacaatcacactacggcaatcgggcttattacctgcagaaaactatggccaaggtgtagatcctgaagaaacccgggattttgtattgatataactagactcatctcgccccagtctcgagtacaacggtttgttcaccactgttcgtgcatgagtttattcggtgggatcctgatgccccaacacagagaagaagcacatattcaggaatttcgtattttgatatacaaaaatcatgacatagaagacgtatgccaacattcaataccagttcacgcgtgctgattcagctttggggaccgggcatgtaacagtcctggctcgaattcttggaaattgataagattcaatgtggtatacattcaatcaataaccaagctaggccgcgatgcgtgtgggatattgatggcatttttgaggggtggattcatgcacagagtttcgagatggtacccacgtcccacacatcgccggtcaacctctatcgtttcagcaggattgaagctcatgtttccgggtcccatcgatgaaagcatcgcatggcgataaggacaacagttgtcaacatgagtgacagtttataagacaatgccatggctttagatgagcgactcgcttggaaggtgcagccgaatgcctgcttcatctggggttggcaatctcattggacaacttcgcttgttgatgatgagtatatatatatatggcatctcgatggcacgaatgatggatgatggagagaaaaaggttgatatcatatgaaaaatgactatttgtaggccaaagagacaatcagagacaaagaacgagcccttctttattggaaggcgttagaaaaggcggcaatatatccatgcagcaggccgaacgaaccctagtcgatttttaaatatttctccgaatgtgtttgcctctgtggacattctatatattttaagatgcctttctagtataagtgccctgtctatttctcatcgaagcgtagcactgcccaggtcattgcgttgcacaggtcggcggaattgatatcctgtcgagggttggacaaggtgagaataagatctttcagctacggtgccccattgaaagagcgcgttgatgcgatgtttcatgttgtatatggggtttactattattggttgtgtaaaagtagacaaccacgtacgcggaggatacctcactgagtgttgaattgatttctgtaagccactgtaggatacagtatctgcattgcagttgcaattgcagctgcagtatcggggtattatctcattcatcatcattcatgcgcccggatcgcctggagtggagggccggtcctctctccatctattagtccctgggttttacggaaaccgtcctccatgtccttgttcagatgcatctgcttcgtcaggtttgacctctagtcctgctcgaataaaagcggcatgcagaatccgccaatgggcctcctggttgaattcgcgtaggctctccagagtgttacgctgcacctctgcccgtagatcgatctggttcgacaccaacaaccccttctcaaggtcgatgcgagcgttcagaatgccaccttgaatgaggccgattagttcttggacaaacggcgacgaaatatccgtcggacgcgcttcgccgccaacgaccgtaggggcaaagatcttcgccatggaatcgagtgtgacacgactgaaaggaatcatgtactgctcgatggatttggtgcgaatgcgtttgtacaattgagggatgtgacgctgaaggtgaatgtcgagtaagtagtcagggcgataagcttcgagaatgtcaaggcattggcggaacttgaagttgcagaagaaaacgatggcgcggcggatatgaggctcgagctcgaggaaggtgcggaaagtctggttgtcaagcacatttttctgcagatcgtcgcggttcatagaggcgagagcacatagaccaccgtagacggcgacatcgttgggggtgatgacttcattgtaggtgtcgcccaggtccggcgggatggacaggaaagagtttgctgcatcgaggtacaaggtttggtgcatctgtgacagagcagaggcggctgtgattttcgaaatgtttttggctgcgtcatctggctttgactgagagttgcgtagccggtgcacatttgactgtacagacatccagtcaccgcgttcagtagcgacgtttaccatcttgaagagcatagaagtaatgtggttcggagtagtgcagtagtctctcatgcgagagtaagctttggaggcagcagctagatcaccagtcttgtaatgatggttgcccaaatcctcatggcccatctgtagaggtaagtgtcacgcatcttccaaggatatttgtcattacttacgcggatgctttctttaatcaaattatttttgtatccccgtagctcatgttccagacgctcagtctgagtctgtacgtatcgattggtttcctggacccaggcggcgtcaagagaagcatcagggtcgctcggagctacctccgccagtgcgcggaccgccttctcatatctcgaaacgtctttgttgattttagcttcgtcgatggcacccttgagggcgtcgatcgagagcaatggggagcaaatgccgatgaggtaaagacggtcatagcgggtacgccctggtcgtgcattagaatcagaagtcgtttagagacaaaagtgtcactcaccagcgtagtttgcaatgtaagtatcaaggtcgaatttcgggggctctagcaaatcaagtaagtgtgtgttcccggcgtagcaacatcatcgcgcggagatagccccgcgtggggttaacataccttctaccttcactagtgcctttggtcggggtacagtgatagtcgtagcctccagagctgtggcatccatatctgcccgagacggaccagatgcgtctggaagcgtggtgtccatctttgccgagctgtttagacgatgcgttgcggggagaggtgacactggcaaatcgaagaaatggagcttgattagcaagctagggtttcagtggaataagatagcgaccaatttgaacgctaagaacaatatgctgttaagggaagtgaatgagaggtgggtgacagccagtcggtcgatcatctgtgatgggtgattgattgtctggcaaaacccgaccgcctacaacaccgccatacagaagggccgtgaagatgtacatcaatacggagtagagatagggcaaaaaagaaactgtcattctctcagagtatcctatattttggcctgatatatcttcttatatgacccaaatagagctaaaaggccaaaagacaagctagaaagctagaatgtcactcaaatcgtaacaatggggtagcttggttgcagcgatacgcgaccggaagactctgttgatcaccacgaagcatataatggaaatgctgaacactgaagactatatattaatccccgggcttatatgaagacgtctgaggcactagaaatcctcgaaagccgtagagtggagctgcactatgaacctcggaacgtgagtaatcacgaaattaaacatcaagtaacctatcggctatataaaagcggctcgggaccccaatatcttgattataatccttcttgccgacagcataaacagatatataatcgacaaagctcggcattcagtaatcacaaacaaagtatataacaagcctaatccaagacgtcaatcgaccccgactcaacttctagcaacagaacgaaactcctaaagcctcaaaatgtcccaaacacagcaagtcaccctgataataggagcatcacgcgggatcggacgccaaattgccatcgacctagcaaagaacggctacgccggtacagccacatgcaatcccacatagaccatcgagactaaccccaaaccccagtaatgctatccgcaaaaacaacatcggacgcatcgacagtgactccgttcccaccagacccgaactcatcgcagtctaccatcaacacagtagagcgcgagattcacgaagcgggcggacacgcggcaacagtcgccgttgacgtgcgtgacgccgcacagatccagcatgctgtcgacgagacggtgcgcgtctttgggaagctcgatgtactcgtgtacaactccggcgcgatctggtggtcttctgtggagaagacgcctctgaagcggtttaagcttatgcagcaggtcaaccccgagggactgtatgcgagtgttcaagctgctttgcctttctttgagaaggggggctggaaggggcgcattattgttgtatcgccgcctatttactcgaggttctttagggggaagactgcttatgcgatgggtgagttacccttgatacgtggggtagaggatccacatagagtgtgtgctgatgatgtgttgtatgtaggcaaagtcgcaatgagtgtcttggtcaaaggactggccatggactttgtacgccaaggccgaaatgaaatggcggtgacgagtatctggcctgcatcggtatgtgtcttggtcttgattccatccggacgtggagtgcatgaggggattgctgactgcatcattacttcctagtcgattgaatcagcagctacagagtataataagggatccgacacatcctacaaaaaggatttgagaaaaccggtatgtccatttcgatactgtctactcttcctggtcaattcaatactgacacgatgcaatagacgatattctcagatgctgttctggctatgcttcgtgccccacatcaaacagtgaatgggctcctggatacagatgaggactttctcagggagaaatgcggagtctctgacttttccaaatactctgtaatcccaggatcgacgccacggcggatcatgccggccaagttcccagtcttggagattgcagagcaagacgatgaagggcagcgaatggatagcacgaagttacgggccaagatataggtttgtggaggggtgaattgaacctctcattcagactagacgtgcatttgatacagtatctgaaaactggagatgtaaataacccatgtatacattaatagggttaaataatattatatcgcaagatacataccaatgtaggaaatgttaaaacagggtgtaatgagcgaacggccagcaatagagtactccataaacccagacaagaaagaaaagaaaaaagaaacagacgcccattgctaatgcagccagaaaatgcaagcccagaaagaaacaaaagactagccaatatcatggaagcctcgagcacgaataacggaaactccagggttcaatgcccttggcgagccaatcagacatagacccttgactctacaagagaacagcaaagccagcaacaaacccaccaaccagaacacaaagcccatagacatggctgatatcaacagagaccatgcgcggagcagcaccagtagcgctggtatctccattgccattgaccagggtattgacaggggtctcggacgcagtagcagtagcagtgttggcggtagtagtagtagtagtcacattgatacgcttgggattctgggctccacaagggttatctactctgcagttattctggcaagtggtgttaccgtcgcagttgagaacgcattggctgttggtttccgtgcagatgtagtaggggattgtcagggaatattcagtggcgttagggctgacgccgttgctgcatgtgcagtcgtaggctagtgtttcctgatgattggagttagttgggacttttctttccgttaagatgcttgctaagcgaagggcttacggcggagcagttatttgttgttggtgaacccgaggctcctcgtagttgtagacagaggagtggacatgtggatgtctgggagttacaccaggcctctaagggaagggagacgtgttagtatgatgttcatatgtatagtggagagaatatatgatatcaacttacgtcttgtagcaagggtaaccgatgtcgggtcaaattggctgttgaccagagtgacagccgaagcgaggatgaacaggctcttgggcagcatggtgtcggttgagcttgagaactgaggagatcagaaattggcagcaggcagctacttgatgctcgtgttagactttttttcttcaagaatgccagtgatagtctgacacatgccctagagccgaaatagagccggcgatagctatctcgggcagatggaatgaagggggaaaggtgtaatgggtctaggaaatgtcatggaacctacagtatgaatttcttgaatctttcaagaacaagctgagaatgaggaggatgaagatgttgatgatctaaagccaatagcaagaggctgctccttgaagttgtaaagatttaggggtgcaagtagctcaaggaggaaaaaaaagtagccagcaagggaggagtggggaggtcataaatgaaaagagcaatcacaggactataacagcctatgtatagaattgtgctagctggtctgcatggtggcatgcactagtgcactctcgcggttctacggcatcgaatggtaattttttccttttttttttcagcaagcccaagatatttcctgtcaagtgagttcagtagtagacccgttgcttcggaagtgaggtgtggatttggacgaagggtccgctataggggtttacccttgcgatgtgtcgatccggggatatctccatgaagctcgggtagagacgtttgtccaggccgggtgggagctcactgtgtgtcacatctgtcatcctgtcgatagtctccactaaaaacacatcattgtaggttctcaaagataggaaagtgacatgtctcagttggagttgagaaactggaaagattagaggacgccgatcaagaaacgcttaccgcattgggattggcgtggtttgtggcttgaagtagtcggatgagattgtgaaagtgtcaagttgaagtcgaaaggcaggcaagtttgaaattgttgtcatatatgagattgatcttagagaaatacaatcaaaactgtcaattatcaacgtcatcaaagggaattgggtacaaagcatgaacatatccatatctgcccagccttagctaatccacccgaaccagcccccgtgaccgccaatgtctcaaatcgactccaattgaatttcgttatcgacacactcaacactctcactctctcgccaccatcgacggttccaaggttagtttgtctcacctctgatcgcttgtgccaccccgagtctggcccatccctgcatcaactccaatgtctaaaatagcccgattcataccaccttatacttgccaccccgcatgatggggggaagaccgccggtccatccccgaaccgagccacatgcacccaaacgcatcgaacctacccaacggcattgaacctcaacactcaacagaaaagctaacgaataccctcctaccgaacaggccaatacctacatattccttacagcatctaatggatggagccagcacccgaggaggccaatccggcatctaagccgccctccccacacccagacatccagcccgaccccgcactccgacctgagaccgagaccgataccgataatgccaatgatgatcctacaaaaaccgacagccacgatgatcaatcccagagctccccatcctccacctcccgccccctctccgccgtagtgcccccctactggcgccgacacgagcgcgatgcctcacatgtctcgcaggcgtcgctgcgtggcgctaccatcacattagaagaccatactaccgacccgaactcggagacgagtcgggggctctgggcgagtagcgttactattgacgatcatgttgtggtgcgcggtatgactggggtggggtcgtatgttgtgtggaattgtacaattcagacactggatgtgagtttgggatcagataagggaacgtgattggcatggctttctaatcggttgtttctgtatagggtggtccaattgttgtccggatgaggtgtgttacttctccgtcccggtttgaaaggatgttcagctgacacttgggctctatagatactccgagttcgatgacctgcgccagcggctggtggcttctttcccgcatgcgaggagtgcattgcctgcattgccgccgaagagcattatctgtacgtcccttgctcctcttaagattgccattcaatcagctaataacccttatcataaagtcaaattccgaccctcattcctggaatcaagacgcgtgggcttggagtatttcctcaagtcagtatctcatcctatccacatgattcattgtgtagacctatttctcacaccgttccagctgcgtccttttaaacccagagttctcgggctcccctatcgtcaaagacttcctcttcggtcgtatatgttaataatcatctcgtcttcactgggtggtgctggataggttatatggctgggcgtttaggaattgcattttgcattttgcattgtacatctctatatttcgggctgatactaggaacctaagcccacaatactggatatgcgactgttacctttgcttacagaagggaacaacttacataaccatggcaaatactagatcagacgaagcggtctaatacatagaaagtagaaagggccatagaaatcgacaaggatttttcaagagaaccgaacaatgccgccgctaaggtacaaagatcccagcaagaaccctaggcgcaagcaattggaatagaacgccttgagtatgatgtagtgcccagcatcgctgaaatagcaacaaagaaaagaaagatatttaacgcacacagggcgaatagaatagaagaacctcctcctcaaaagtcttgcctttatgggcatgttgagcagaatcatccttcttaccatcacccttcaacttgtgactcgccacaaaagcctcgacatccgcccggaaaatcttgcgcacacttatattagccatatggatcatggcgagcccgtgtcggggaccgggtacgccgcgtgggaaagcaatataaagatccgagtcctgggtcgggtccgggcggaatttgtcatggtatgcctttttgccgctgatgggcagacggtggaacgcatggtcgtacaagccgcgtgtgatcttcttacaggcccacggcatgcccccgatatcctcggcggtgagtgtttggagcggttcgacgccgagaccgaggtatgagatgccggcgcgtcggaggagcgccattgacataatgagaagaaggtcgctgattccattcacgcttcctggggctgcgatgcacggatcgacatggtagccgcccgaggcgagccgtcgaagagcggcgaaaccattgattgttccgtctggggtgcgggtgtagaggaatgtcatcagggcgggaacagcaaaggggtcgtatacggttatgaaggcttgcgggatagcagatgcgttgcgctcggcgcgccaggtgtcgtatatggtgattaggttgttttgtagttcctggtttatgccgtgcacggcgggggcgtacacgcctatggtgatgccgcctttgtttttgtttgtgagctgacgactcttggtcaagatgcgtttcccgctcttctcgagaatcacttcgtttgtctgggggttgagtacgcgctctgtggcgaagtggatggttgtccagccgtttggtttggcgtgatctttgagaaaggactcgctaacgcccatgaatgctatgctcaagtgatgtcgccgtctgtaggctgcgaattcggacaagacctctggtatttcgtctttgttgcataaaggatctccgccgatgattgccaccccgttctggaccttaaatgacaatgctgctgtccttgttttgttcacgaagaatcggtagctgtggtcgaggattcccatgtgtgccactctgccatgtattgcagctatttgttggatcgccgttgttgttttgaagtcgtcgagtgtgaaaacggtatcttgatctcggcattgcgctttcgcatgaaaggaatcagtatcgactttagttggttctgggcgagtagctgggatgcgttcattactatccacactcgtcgccggggtggaatcggatgttgtatggcaacttgccgaactgcaagaggaagagaccgcgggacttgcgacgatattcttgcgcaagtgatccataagggaaattgacgagataccactgtcatcactgctgggtttggatgtctcaaagagctggtcaattaaggagtctcccatctcatccacgaacaaggtcttcggttttcctgtgacggggttcggagtgtttccctttcgtgcgcggcgtgatcgcatcttcttggttgtgggtacctcatgcgatgccgcagcttccgacatggtgagtgggacgcggaggcgctcggagggaataaaagagcaaaatatatgagaagtcagaaaagaaaacagcaagaaaaaatcaacatgaagtcggagaattgtcgggaaggcaaaaatggcgagtatgaaagtgctcttgcccgaagctacgtcggtatattaggcagaggcattttcataggcagttcccttcgtgcccatccagtgttaccgcactgcgtacccaggggtatagatcggtctcaccaatcagtagacggcaacggggctagatcgaccgctaccagccttatgagctcttggctcgtcctatgacgttgggaacagcagaataaagtgtgaagcgaactatatatagtctgggttctacagatctcttggctattacaacatgaccatgacgaaccttggaatagaggtacttatctctcacctctcatatacctttgtctaatttgtgttggagttcaattgtgccatgagaaccagccatctgtcagtatcagcatctaacctaagtatggttagcgatcaaatatacaaactggaagctagctaggtgtgcttaggttccaaagctgaattatggagaatatgcaatgaaaaaccacatgaacaaacgcaaaagactggatatcgtcaagttcaaatgggggtacatgaaggcgcaatgcaacgcaacgcaacgtatgtcttgatcgaaaggaaacaagcattcaatgtccaagcagaaaagatcatctcagcatgacaaaactggccagcgaaagactgaagggggaaaagagacgactactcatccgcagtaccgtgtccatccatgtgtccattcactgcactacatccattggcaatgtcatcaccatcactctcttgttcaatactggaatcactgaattcaaaaagcccactgatctcagtggaagaatcatcactgtcacaccccctagccatccgtctcagacacgccaaaagttccttctgctgcttcaagatgttatcggccaaacggacgatcctgtcagtctgctcaatgcaataccgcatttcttcggtctgacgctcggtgcgaacacctagcatcgaatcctaaatctctttattaggataacagtatccagaggaccagttcggtacgttcggtactgacaatgtggtcgatccagacttgccctaggatggggtctggagtctccggcaggtaaggcgagtggagattcacagtacgggacacaatacagtcgcgatggtggtaggcagaggagctgcttccttgtccattgcctgatgcggaggcagaggcatggggacgggccggttggatgatctcacgggtgggtctgccagactccatagtagggctgttaaattgaatttcaaaatcttgaattgaaattatatttttaattttcatgaaatttaaaatataatttcaattgtttcacgctaaggcgctagtaatatattggtaatgttttgtaatataagcagaaaaaaaaggcagaaaaactagcagtaaatttttagttactagtaaattggatgcacaaatttaaggtccctactataagtactcaaaatttcaaagggttaaaatacagttaagaggtagttatggtgcgtacaaaatatggccgaattaggttagtgtcattcttcccgtagccctaaacctcaaagatataccttaactttaaccacgaatttcagacgctacactagctggatacgaaagataagatatggtctagaatgcttaagaaaagggctttctagtgatactaaaataataataaataatcattattttatatgtacttaggctctatgatttcctatatagaatataatttcaattgtttcacgccaaggcgctagtaatatattggtaatgttttgtaatataagcagaaaaaaaaggtagaaaaactagtagtaaatttttagttacacaagtcataaggacgctttacacttattataatacacctacccctatcagtagactcagagtcagaaagctcatttcctagactaaggctttcagtctaaggcttaagagaagtcatatcctagaagaagcgatttctgataatctgctccttatcaaaccggtctatctaatcctacgccttttctaggtcaggctattggataggccctttacttataagtcgatagtttatctagagatagattagcttattaaccttcttaggtaaaagagaatgcgattatatacctagtgatttcgaggcaatagcgtcgactgcgtttcgcgcttaagcctggctgtagaggtgaccataccttagtaggctggttctataactgacttaaaggtattgctagctgtaatacccgctttaggtaacgatagggaaggaaattctaccgcgtatactaccctatagattattcagaggctggtccttacgcgtagtaatacagtccctttataaacccgccaaactattaagatagtaagagtaacgaccagagtaataataataataatagtccctatagtcctaccggtagtaccgatggtagtaagggaagtggtactggcggtagtagggctggcgatagtggtattggcgatggtggtactagcgatagtggtactggcgatagtggtacttagagcgactctttgactgtaagtcttctatagatatagggtaggataattagatgtcgtcggtatatagttcggccttgtataagagtgcctgaagtaggacggggtggccggatataggggctacagggagcattttcttacctagattaccagagatatatttttgacctatacattgcactctacgtggtctagcggactagcgctacataagcgtaggcggtctaagaagaatactaggcggtgtaggtaagagcctgtattcggagtgcctgaagcaggacggggtggccggatataggggctatagggagcattttcttacctagattaccagagatatatttttgacctatacattgcactctacgtggtctagcggactagcgctatataagcgtaggcggtctaagaagaatactaggcggtgtaggtaagagcctgtattcggcctaattaggcttagagtaagctatgataatcttattggctctctgaaaaattaaggtatctaattggtggactactaagagtgggtccatgcctgaggcatagaccgattttgaaatgaaataatattttagcgttgaaattgaaattgaaatgatatttttaaatttcaagtgattttaacagccctactccatagtgggccgctcggtggaggcggtaacgggatcggcggcagccgcggcggcagcgagggtctccagagcagtgaagcgagagcgtctaggctcaattcctttgtagctcttccgactactgccgtcaggcccaacagtagcaagcttaacagtcataatatgaacggctgaagcaaatcacgggttgaaaaatgagcgatgaataagaatgggcaaaagagcgaaacccagtgaccggatcagatgagacaagcgttgtgggatgaggaagactgaagggacatgtttcgatggcactaccctttccccggtgttgacaagagtaaatgagtccccatcgctgtcgcaagacaatgttctccctctttcattttctatactcctgattggtgggtcaccatgtgcactagtccaagaacagctagcgcatatatccacacgctactcccatttaggaaattgacatcccgcgatctcgacaacatgtctgaccactcacgcttgtccagtcccttctgtcgaacattcccccctgactgtctatatctctgtacttctacaataaaacacaatgatcacaaatcgcccggctaccccagctgatatcccccaagtgcgggatatcaatcactggtacatcgttaacagctgttccacttttgcaactaccccaccgccgatatcccattatgaggacatccttcgggacctgtccagaagaaacctccccttttatgtcgtcgtgtctgacacgcggaagggaccagacggcgcagatttagtccttggctacgcttacttgtctccattccgtggccatttgctgtcctatgcaccgaccgtggagctgtcgatcttcatgcgctatgaccagcggcaatttggctatgggactattattcttagaaagcttctgcgcttagtgcagcagggggaaattgagcaccgctgcgaggagagagtgggcgatctgccgcggattgggtttggtacctccatggctgtcatgaagacttcccttgtgcagaatatcattgcaatcatagcttatgacacggaggctccgtttgacggggaggtattgcggagatggtacatgaaatgggggtttgtcgagagggggcaattggagaacgttggacgaaagatgggtcattggtgagttgcttttatctgcttggactgatggattttccagctgatgactttgactaggattgatactctctatcttcaatggtcaatgccagaaacagatagttattgatttggaatcagcgaagtatccgagtcaatggataagcaaaacaggttggacagagatgggagtgtatattcatagtcaaggcctagatagtcaatctgctcagatattataattagatggtctatgattggcgtagtttctccatatcaccgcaaggcaaatataaagatagggactacgaccgattctctactcgatgatggctcagcatgcaaagcttggggaagatagatgtgatgtatttctagctagcttggagccaccttgtagacagtgatatcaatgggatctgacttcggccaaagacaggaagccactcgcatacccactcttctccaggcaacaggctggtacctactgacaccccgagagcaactgtcgagataattattgaggtatctggcatggtgaaaaaaagaattcgaactcgatcacccactctggatgcccgaatatcttatccagcgttgccatattctgagccagatttggagcatccgcttgaacctgctagttggtgactctttgacttcgggacgtcgtaaccttcatccgtgtccgacctcctttcgaattctctatccaactccaggatttcatatggcttgtatcgggaagatgtaggtattcttgttgtataatgggaaggaacgtgtaggtgtaggttccccggcgcgcgcggcagcgtgagcgttgtccgcatccgcttccctgtgccggctacatcaaaaaagcaaaggtcagcatgttgttcctgatattctacacaacgatcaagtgacatacctctcggtgcagcttacagtggtcagccttctgcaagctggagctaatctgcaagttaaagtaagaagtcaataaaagcaaagtgagaagagagtgaatgcaaggtgataggacagtaaatacccaaaaattgaagaggaaagaatgaaccctctgcaaggaggattggttgtccctgttcaaagtatgcaggatacctccaacgattctgtcaaactggcggtacatcatacgttcgggttcatcaggagattcaccaatctggaagttgatgtaatgggccaagtctggcatctcgcccttgagctcgtgaagtatcaacagggtaggaagccaacagtagctgacttccttgcagatactagcctgagcgcggcaagtggaaacaaaggcatggaacgaacgaaactggtaccatcgcatcgtccacagcttcatgaatgccctagactcggtgtcctctgcatcgggcaacaagttgataatcgcaaggtaggcctcgtcagctagtcaaaggtggttattgctagattttatgagggcgacgaactcctcttccagactaagtatcagccatttgctcaaattctgcgaccatttcagccagttttcatatttgatgtggtcgagggtgggtcgtggaatatgctgatgtttgctgatgatatcaatgaggttgaggtctaaggacgagctggatactggttttccaggatttgagatccgatatctcggacaatttcttgacatttgtgttagtaatttcgtcaaatggtggcaggtcatcgattcctgggctcggattgagccaagatattccatggcgttggtaaccggagttgaagacataatagagagatatcataggacctgaaatgatggttgatacgggtgaaataaaatatacgcataataaaaagattgtttgagtgggaaattctgttgtgagaaacgtgaacgtgatgctttaaatcccacctcaggacgcactcgattactacatccaaacttcattattcatatttgccatcagcaatcactactgtctcgctggttccttcttccctggctcgttgtacagtcgcagaatacctctttccagcaatgagccaccaagcaagctcaatactcaagaatccaccgacaacaacacaggtatagttcatgtttgatactgcgtggctgttagcacatagcttgggcaggatacaaaggaatcatagaaaaccacagcacataccagttacaggcatctgatacggaaacgagaaaaagacaatggcaaacaccagccacgccaaagagacgatgttcacggtcattcctagtgtctggcccatggagaatgggccacggcgcatggttcggcggaataagagaacattcgtcagaatgggtacaaggtaggcaaagttgttgatcgtcctgtatccatgtcagtgtcaagtcgttgctaactgctttgtagtatgaaaaacctacaccgcagagctcatcattgcattgaatgccgtgctcgaccccaagtatatacagccgaggagggcgataatcacggtaacacagagctgcgcattgaacggcgaacccagcttgggatttacacgggcccataccttcgacaaaggcaggccttcgtcacgggcaaaggcccaaaagactcgtccggtacctatagaagtcagagggttgatcttcgatagcgaaagtactacttactcaactgtgaacctatgacgcagggcccaagggcaatccataccatgaacaccagcccgaatgctccacctcttgtagaggttgcctgccagaagagctcggcaagaggaagtccagtatgtgtgttagccaagctgccataatcttgaactgagaacattagactgagcagatatgatagtccggtcacgaatgcgattgatagcgtgatagctgttgatgcatacagttagccaaattatcgaagaaagcaacacgaccactactaacctagacccaaaggggcattctttccgggctataaatgctggttagtacaatacatcagatttgtatctccgagccatctcaacttacattgggcatttcttctgtgatgtgctgtggtatggtcagctgcattcaaccgggcaccttaacaatgtgtacaactcaccgaaatgccatctagtcctccaagtgagtacattggattgaccaatccggtgataaaacagataacattgttgtcccagccggtgttgttgatccaggtgcgaaacacgaacttgctgtcattatgaactggggctttggcggccacgacaaccatggtaataaaccaggctaattgcaggtagaccactgaaactcattaattggtgaaccacacaggaaaagaacccacatacatgaaaatttgttgattgccggaataaatcgattcccaaacatcaccacacccgaagtcacgatattgaggatctgataagcgacaaaggtcatccacggttggaccaccaggtcatcatggtaaagagcaatcagcgccatggcggttgtggcataaatcaaattggttgatgcagacgtaaagatccctaggcttcatcagctcatgctaagacttttaatgctgggccacccacatccaaatacagtgcaccagccggtggcaaagctgagcaagctgttatatcgcttgggagcaatggcggcaatccaatgatacatccctccttcggtagggtatgctgatacaaattccgccagtgaagcaccgacaaaagattgaaggatgaaaacaaggatgaagccgtatatcactgcgcttggtcatttattgacttccatgcgatcggtacggaatgaaaactcacgggcgccaggaccacctgcgtcaatagcagtcatcaaacccaagccaaggcctattaccatgtgagtcggatgctgagcgattgcatgaaccaactaacctgtccatgaaatagtacaattcgctgcgagtccaatcaaactccaaagcgagaaatgtcgctccaactcctgcttatgccctgttcgccgtcaataccatatctcccaagcgccggattcgacacatacccatctgggccaaccgcagctcatcctcattctgcaccttgataaactcggtctctttcccatctccaatagacccgaccggcggagaggtagatataatttcagggccgctcataatggacataaaatcgaatatcgcccacggtaggaggtgagtatcacgaacagaaaaagagggggtacacatgaataataaataaaccctgcgcaacgactgacctaagtaccatcatgctactccgcgcgatgatctttagctcttatcacaacccggcaaacctgcagaaatcaccgggttcgccgacaagatagccggtcggcggcgacgtatcagcgggcgggattccgccaagccacatgcgtcccggcgatcgcggagcttcgccggtgcagaatgtggggaggactggaacccggaacccgctcgcgtgtctgcttcatgcacaggccgttgtaaccccatttgtgcttggcggagtataagcttgcgtcaaacttggtgtgctgtgcttatctcaatggaataattcggagaagattgcagtggatgtggaaggttgcgacggcgtaatcgacgatgagtcgtgtagcttacgagtgataacacacgatgaacgactgtaagttcatatggtcccacttggaggtcctgggtgatattgtattttgtatcaacggcattattcatcctgaccgacgacatccgaagatagtttcgcctactcatatgctattccgacaggtggaacttgatacctacgggtctaagtgcatatcgaggtagatatttgaatctacagcttctgttcgcacaagcagtaggtccttgacaattttcatatttaaattaacatcgctggtcaaattaccaggttttcacagtccgtccccttgtatacagtatcaagtatgtattttcattcgaaactcccaagttctcccgagaaaagttgcttcctaggaaacgatttggtttgccgaagttggacaagtctggcatctcttcctcgtgctcgtgaagcggccctctgaagaaacatggtcttgaagtcttccggagctcctgccggacggctggtttatcccaggctctttcttggtgagaaactggatatgcggaagatttccgatattaatgagatgacatgtttcatctagcagctccacaaattcttagttggattcttcgagtacttttgtaaatactcaagctttcgaagtatttcgtactggtcgatcaacagaacaccattctgaagaggggatgatgaatatgacggagtactctgtttgtttcgttaataggatccaggacagccgcatagaacgagatgtttggtcgtccgttggatgctgagtgtagttggtctggtccagtgcgaaccagtatagcctgccaaccagagagatactctgcgctgtctttatcatggcaggaaatctctgagtcctcgctctcatcattccatttccacgatcggatcggcttatgttgaagaaggaattagcgctccatattttgaagtacaaatcacacagcacatacatacatacaggatctgctgcgatatttcttgacctccacaaccaacagagaccatcaaagtggaagtgggaatcgcgctctcaatcctagcacttctcggaggatattgggatcacgtcacaggtctgccatatcttcctctctctcattctttttccctgtacacccagttagcatacagtccattatactgctcgttcttcttgtggtctcacatcgtatattgagagtatattgagatcaagattgtgataaatataatgaaacggaagtaagacacatctctaccatgatttgttaagtctccggatctctatcttccagcgctctgtgtcttttgagatatatattatatgacagattatttacagaagaagaaagtagccgacgaattttgtccatgacctggttaaatatagcaaacagcaaacagcaaacagcaatgggataatgtgtgacggattcagaacacaatggcatccccttagcatctttctcctgtcgcagtggatatcaccggagactgtcctattggcttaggagattatatttccccgtgggcatctcctaatttctcggagataaaaatccattcgcatgtactgattggcgacttctgcgacagacacaaaaatgaataatccttccaagcacgacaagaatagccaaaggataaactattgtgtgaaaattgaagctaactctccaactcaggggctattacatcattgagctctttagctttacgatcttgcgcacgaactcatcccgggagacctcaggatcgaccgatcgatccgatcgagcttgaaaattgattgtaaggttgtcgatcatttcccaactgctgggacattctggcactttgccctcatactattgggatctattcgctctcgtttcaccagaaccatggactgctggttcaaaagactgccgatcaccctcgtgggcgatcatggacgatatagtcataatcctacagatttttctttaaaagacctggaaggcctaagcacagatccgatctcgatttcgatcccttgaaatagtacagcatggaaccgccgtccatcccagataatcgtcctatcaagagacactccgacatgtcttctacgcctactattgttgagccggatagctttggcgcacatttcaaacccatgagctataattccccacgttcaggttctcggggacaaggttacgaaccgccagtgtttggccagccggctattggaagaccatctgttggaccgcaagagcgatcaactcctaacctcaatgccaatggtatctcgaatggcatctataatggcgaccagtttggtcgcaagctctccatcgatcaacaatcagtcgcagattcagtcaacacactagatttgggctaccacaacatcggccagcaaccacgaccacagcacgagatctcaggccaccaaccctttgaccagagatccctcagcactctctctctagaccaacagtccgtcggaacccaatcgctaggccaccattctataggtcggccaccaggcggctatgctccgtaaggccgaacagtcccaattgccagaattccgctaattacgcagatcatctacttcgcccgcccgcctccactcgtctgcatccaacaggtcgctacaaccgaacttgccgaccaacgaactcccagttcttcagcagataaatccaaacgagggctctgaggaattcgaccctatcgctgaagaaaatgaggaaacatcttttgatctggtcgccccatacgagggcgatgcggcccccatgcatactctagaacgacaagcggacctcatgttttgctcggaccatatgctagcgattctaagcactccgcgctacctcgcacgcttccgcgagttccttgcccaggagcgtccagggtcattttcaactctgaattactacctaaatgcttccaaggctctcaaagcaatcgagtatgctaattcgctcgtacgttcggttgttgatgtgcctacatccggtattaaaactgcagagcacctcgttggctcgactgtaaatgtggcgcttgaaaggcgcgtgcaggcagcgctggatgccttgactgccgaggaattacctgctttcattacctctacatgtatcaacattaccggcaaggtagttgaggagcatgtgcgcggaaccttgcctgagaaattccggggaacggcagatgcgctgggtgaggtattctgtctgaccgatccatcgcggccagataaccctattatctttgcttctgagggtatgtcggattactttacattgtctacacagaatagctaacgcactatgcagaattccaccgcactacacaatacggcatggactacgtcctaggaagaaactgtcgattcttgcaaggaccgaaaacgaatcccaacagtgttcggcgaattggagaagcgctcagggctgggcgacaccactctgagcttttcctgaattagtatgtgccccaacacatcctaccctgcaaaactaattcgaaaacagccgccgcgatggctcaccattcatgaacctcctccaaatggctccgctatgtgacagccgcggtaaaatccgctacttcatcggcgcacaggtcgacgtctccggactcgccatggaaggagcccaaatggaatccctccaaaacatgcgagcgcaaaaagaaacccccggggcagatggccaaataaccaaagaatcaaatagccagttccaagaactcggcgaactcttcagtccgcgcgagctgcggaacgtgcgcgagcatggcggaaccctcttccaaccggtcgtcaacgaagatcccaaccaccgtctattcctccaagactccgacaccgagaacgaggtcgaaacccaatcccaaggtccaccgagacccacatccgggccgacgcccagccggtccttggccggtgtctacaaaaacgtatgtcatccatccctccatactcggatatggtatcgaggactaacagaagtaaaccagtacctcctcgtccgcccatacccatccctccacatcctcttcacctccccctctcttcaaatcccaggcatgctccaatcctcattcctaaatcgcatcggcgagacaggcgcgaaacgcgataatatcatcaacgctatgatggctgggcgaggcgtcacagcacgtatcaagtgggtgaccaaattcaacaacgaccaggctcgtcatcgctggatccattgtactcctttgctggcgagtaacggccaggtcggtgtctggatggtgattgttattgatgaagaggaagaggcagtcagatggaagggtaattggccgactactaattaaatagtcttgctatgtatatgtaaattattgtgatcactaaactatctcgtgtgtgttgtaatacgttagacttcatgtgtaccggataatgcctggcgctcgagacttttcccctttcattttagtgctcacctcttgccgctttttgctctcagagtaaaattgagcataggctgagcgtaagtatgagctacatcaataagatgcagcacgctagtcacatcacgtgcggctattatctagctcaccctccatacattacgacagcatcctcagcgataatgctggtgttgggtcctaggatactcacgaaaagattacttcttatctgactggcgctattatgcgcaagttggacggtaatactcttgtttcgcttttcttcggtgatatggaagtgcgtttgttgccgcacctatgggaaagcaccagatacatcgatggagaaccccgatttttgcgtaaatactgagccccttagcacgcaaggcctccctcctctcctcgaatgacgaccgggtgactgattttattcaccagccatggtttctgaccagaagatagacgcagggttagctgtggggagtgagatcctgccaacaatcgttgaaagtaaagaaaacgcaatatccagtctaacatggaaagctcgcttttaggacaacatcatcacagtaagcttccagttatggactgatcttttccctactctttggctcctgaaatttatactgtacggaaaatctacgtcagccagcattattaaatacctacgaaggtcagcagtctttgctttatgacatattcccagtttttcttgcttcttctcgcagaaacctgccggaccttgtcaatctcgtaaatttatatacccgaatccacgtttcatagaatccatcgcacctgctgcggcgccaccgtgatttcacgagagcatggacgatttatttctagccaaacatcccagcgccaatcagattctagtccaaacagctacggggtctttttacgttcttagtgctcaaagcttactatcggagatgctaccgcgcgcatactacgtctacgatgcaaccacagaccacaaccgccactcaaaaacaaaaggagcacacatttacactaataaaaaccctttaggcagcctgccactgaccaaaagactgtcctctcagtttctttcagagaagggagaaccggaattatcttctcggtatcgtccgcgctaggatttggttttacgccctaggggtttcctgtggaacagggtggccctttcgaaattctctttgggcacgtcctgtacaactacctagctggcgagcgatagctttaatcgaggatctattactatacagaattgatggtacgcggattccttgagattaacgttcctttggctagctatgtttggtagtcctcatttcactaggtacatcaaagctgtctcttcataaattacaatatcagaatagtgcacttggaaaagtgcctccgtggctttcatgttcaaacctggaccatgtttgcatattcatattcaagtggcgcgtggttatttccaatttggttgttcagtttcccactcattaagcaatcgcgatacttccttcaacgagacaggtttcgtaagaaataggtccactcctgagtctagcgccttgatctccgcatgggagctactaaggccagtaaaagcaattatttttgcccgaacgcacccatcccgtgctttttccatcgtgcgaatgatgcgcgttgcttcatttccgtccatgatgggcatggaaatatccatgaaaatgaggtcataccccttcgacatcctctcgacgcactctactgcttctctgccgttttgtgctatctccaaaagcgggacctttcgtttgttcataaaagtcgtcatcaggcggagattgatatcgttatcatctaccagcaagacccgaggtccgctctggctctcatttggcgtaccagtaggatttaggctggaagaattcgatagagtagacgacgtggtacgaccggatatttctgtccctgaaagtagcacgggattatcacgcctgacggagccaacatgtgagtgtaggtttggtgtgaaatccaatgactcagcagctggtttctctggatgaccaagtgacgaatgtgtggaagtctcggccattggaggcgggcgtgcaagcttgagtcgttccggaaaggcagattctgatccggcagtaggtagatgcgatctaggagacgccggtgtcgaattaagacagcccaagatacctcttgcgagtctttgtggaccgcaaggtcgacgtagaacgctaaaagccccagcaaggtgtgaccactttttcctagggtcactggagttgtcccattcattgcaaaagacgagcaaatttggtgatccagtaagtgattgccgtaccttttcgtcggacaagtaggtctcgttaacaaatacaaaatcaatatattcattggcagaccaaggcacgaccttgatgccataccaatccatcaaatactgagcgatcgaagaccagaactgatttccgataagggaggagtccattccccaaaaggcagcacaactcttcgttaaccccatacaagaaagttgtgtggacgggataggcgactttcctgcgcaatccacatcaattgatgatgaatattcttcctcggttagacgctcaagaggaatcgagacttggaccacagtgccttcgcctactcggctttgaaagtcgatacttccgtcaagtatatccacaatgccgcgaacaattgacagaccaaggccggtacccactgacagcgtatcctcctgcgaaaatggagtatataaacgagtccgtaggtattcgctcgaaatgcctttccctgtgtcggatatagtcaaggttaccatatcctcgggattctgacgccgcaaacgacctttcggacactgagtggcctccacgcaaattgaaaccaggcccttctcggtatacttgagagcattaccgagaaggttcatgatgaggcgccgcagcgatcctggctgaactttatatacccagtcgttgttggtaatattaatgacaatctcgatatctgcactggaggtgacttcctcgtcctctcttaccagttgggtaggcaaactccgtgaaataagtttggaatgattggctagcgatgcagactgtttcatatgggaatgtcccaagcacacactatcaacaacgtcctctgtcaatgtggcaatattagtcgccacgaattgatccatgcgcgctgggttttgctcggtaaactttagctttgagaaatcctttcggcgcctggaccttctcttccgcctttccaatgacatgattttgctaaagtctagcacttggttcatcgtatccaatagtgttcgcccacatgcattgatagtctcgataagagattcctggaaatcatccagctgagtgtctcccaggaattcggttgcagccaagacaccatgcagggggctgcgaagctcgtgtctaagaaacagagtcagtaccagctgcattttagagagcaaatgatgactcacgagatgctacttatgaagtcccccttctggcggtctgcgatgaccgattcaacacggctgtattcggtcattatggacgatgcgaagccaaatattgaggtcaaatcaacagcccgactgaaaactcttgtcggttgaggtgtccaacagaagcatccagcaaaccactcagaattggtggcatcccataagggaacaaacatgacttggcacgcatcaggaaaatacgaattgagtttaaaggtttctgaggccttgtgcttgatccgttgtttctgagttgcggtagtggaatgctcttcgtccgaggtggataaagacccatctctgtgaaatgaccagagtcttcccttgggatagcgacgagttaatcgatatagaaaatctttgtccatattggcagccgcgcatggcgacaaagagttatcctgagacgaaaatggatcaatcctggtggaaatggaaagaacagacgcagaagttttcggattgacagaagtagagtcaccgctagagaaacaatctggcgagacgtcgctgaccttgagaaagatcacgccgccagcaccgtgcaagtctagaccttgccttaaaagatttgcagctcgttgaaaaatccggtcattgctatccgaggatatcgatgaactgctgccgcctcgacgtgagcttctgaatgaagccgctgcgtttgcaaaaggctctacgtctgaattctcgttggaaactgcgcttgaagaccgagggtcaccaatttgagagtgcgcatcgctattttcagagctggcagatcggctcgtccgagagtgcgccgatccccgcgaggaagaactagagtttgagctctgggagcgagacatgtggtcattgtcggcgaaactggatttgccatcaacgaaagaacgcagactctgcgacagccgcgaggcgcggtgcccttcgacggcccgtcggctgacgtgtagatagtccatgaccatcgctgccactgttcctagtgcgtccttcccatcgtcagacaggccgtcacggggttgagtatccaacacaaacaagcatcctagattagtaccgctgtcggtgatcaagggtgttccagcatagaagcgagagtgtggctctcctttgacgaatggcaattgtctgaagcgctcctcctgtgtaagatcgttgacgaccagtacggggaaggttccatcatccgtttctgaggcaactgcgactgtttcctgttcagataaaagatcaaatccagaacaatgacgggtgcgtggcaaaatcacagattgattggccttacccaacatatgttccaagcgtttggcaaagtcgatgttccggcaaaaagcccatctccctccgccgtgtacaacttcgagtttccaatatttgtagtcttcgtagcttcggctatgatgaactgtgaatcgtgattcaatatacttgatggccaaaaatcagcccaaggtcaacgaaaatgtaggtagatccgtcttggagatttgaaagataatggaagaattacgtgataaaggcacgctgtgcgttgaggcgtatggctgcctgctgtgcgaacgaggtcaatgtcgtattcggactagacagggagctagattcggtttcaaattcggaggcagcagagcgaggaagccatgctgcgttaagcgcggcggggttggctggttggaaataccgatagacctcgcgagcttgacgatctgcttcgtgggcatggatagtctcttgtgttgggttttccatattgataataatgcgcagatttacaaaatttgtagaatatttctgggaagtcgggatctagtgatggtttcaaagatccaggcacatggccagagtcgtatgacgtagatgttcctgtatcacgccttggaagtggagaaggcaaaatttgttggtgacctatgacgtgcaagagagagaacatcagtcatcgagttcttgattcctgttcgaagattgaaaagggaagctctccaattgttggacctgagctctgactgcttgcagctctgtgtttaatgaggtattggcagcttccaggtcttcgttccttttctgttccgctgataacattgagttcaaccgggtactcatctttccattgtaatggaatttctccatttgagagatcgaattgtgctaaatcgtccacagtattgaccccaaagagagcactatgtgctaatgcgagggagagaagaaggtagcctgatgtaaattgcggtcggttgctatcccggatactaatcccgaatctagagtatcaattagtaaatgaaatgtcctaactagttagtatgcctaaaaaccatgctactaggctctttctacttatatagtatattagacatctattattcttaagctagacctgtttgacccgctatcctactgcctaaggggctttggttgaaggaaatagtactaagttaatatactgaaattgtaattagtagttaataatatcgctagagtaaagagattctactttatatcgaagacatcttttatatttatccttatgaggaggaatagaagatctaacgcttactctaataaagagatatagttaaagagtaaataagatgactattttaagtaacctagagataaacgtttaataatctatctactataaagacgatatcgttctttggaaattatatctcataaagtttagcttctctctcttttggttcactattataccttccgccgttagggtttttttaattcactatctccaaactagaatggctatcaggattagtcttagagggaggtaacgatagactcacccattttatttcttttcgatcatctaggatgattttagtctttataaattcttcaaatccaccaaagaaccgctcggcatacgcctatacagttcttaccgttggtcgtccgttctcgtttagtcggcctttagtagaaccaatgtaccagcggataaactccttaatcatctcgtgacttagggctggacagccaaacgaggtcttatagtatttaaatctattttctggcccaaagatcaacattttatcgatataagttattggtctcggtaagccttttgtctttctccctaattaaatcctcctatctgcgggctctagggtcataaccgtttctttcccgttaaagacgacgtctctcttttgcaatcttattatacttagcaaaacactattttctacccatgaataattgcgataccataagggggaagggtatttcgggtaaatgagaccggtattgatttagagtactgagaaaaaggcgccgagagcgtaggcgtatgaataatcaacatactaggctaggatatagtttgcttttatatttgagattcgaggtcaagccataatgagaactcagaaagaacccttgaccgcagcattatgaaatagaggcagccctccacttcctcctacgcataaaaataacgtatctccttgataagatgggtagggttcagaaaataagggctatctactaactaaacatcgcagtataaccgaccctatgggcctggtccattaaaggtatagtctgtggtggtctgggtgatcagagttgctcactgattggacacagagtgtcacagagtagtcagtgaggatccaatagttaagcatttacacagtatcagtcatcatgcacgtgactgctttgagctgatcactgactgagcttgtgctgatttgatgcttttaagttgtatccagctcctctaggaagtttaggagatgataattgcgagatcaagaataaaacttctactaaatagcttgcaagatgctacttgtcctaaatcttacaacctagtctgtatcttacatatcctggcactcgagacctttccctttcggcttcagtgctcaccaagtgctcaccccttcatcccgacgtgatcacgggccattatataactaatcacctgatctgctcactaagcatcattatttgctcagtgtagggatggatgcgaaattcaatttgcccctagaataacatgttggactctgctttgtacattgaaaattcttccagtggattagattgtgcccgttgccagcaagtacccgccgtcgacggcaatagtttgaccattgagatactgattcgagacagtaaacaacacagcagttgccatgtcttcatctttccctggccgtccggcagggattttgccttcaaacctctctttgggaattgtgctcttttgtttcttgtcactcccatgggccgtcatttcggtcggaaagaccccgggtgcgatactgtttacacgaattttgatttgcgaggaaacaatctcgtaggccaacatcttggtgagatgaattgcagccgccttactagcattgtatgcgaagtgacgctgggctgtttttaggagacctgaaatcgacgagatgttgacaactgtgctagaccatccatactcatcctctgatcccttgctcagcaagggtagaaaggcagtggtggtaaagaaaaggtgtgtgacattagtccgcatgacatcttcccactcctggatcgtgctctggtttttgaacagctcttcctgcaatgctttggggttgtcctgatctgtgttcagatgtggagagctaataccggcggcgttgatcaaaatgtgcagtttcgactccttcgcggatatctcgtcgactagcttctgaatcgactctttggaggtaatatcggcagtgattgggacaatctggccaggaatatccttcgagtataaatctgcaacacggtccaacttttcctctgtgcgaccggtgatgtagactttagcaccattcacggcgagagcttgagtggccatcaagccgatgcctgaacctccacccgtgacaagtgcgactacccactgttagcgacgccagcgctacggcaagcccgtttctataatggtaactcacctctgtttttcagcccgaaaaggtgttcgagcttaaagctccggttactttcttgagctgacatggtgtttgttcaaaagttcaatggtatacataatgcttgtcatacatcgctcgttatatgttctccaacttgctagtcttacgtcatcctaatgtcaggctttacgatgatgggtacttgatgtaaaacagggaaaatgacggtttggggtaatttattcactaagaagtcattatgatgagacattgaaagaatcactccgtataatgatcagaaataggtacagtttcttgccaacattcacttaacctgtctaaacccgtctgtatcttgatgcttaaatcaagatctagaccttctaagatccatcgagcatcagcaggttttcatcggagtgtccttgtattggtcggatacatttactacgcggaaatgatatgtttgaactacttgatcttagtgcatgacatgtgccaagccgcacaactcgctgggttaaaaacaggcatcgaagctttttttattgcactgaacgagtataaattcatgtatgcttcgtgaaaaacagaaatatagcatataataaattggttgaaagtgaaataatggcaccccatgagcaaaacgagcagagactcataattacctcaaatcgccttccactttccgtcaaatccaaagacgacacttacgaggcgattccctccagcgggggattggtgaccgctctaaatggtttgagctttcatgcctatctgtggctaggctggcccggggtcgatatcaatgaacgggacagagaaagcgtcgacaaagccctggccaaagaaaatgcctctgcagtatacctagatgagagcctcgctcagagtcattacaatggattctctagtacgtggcctatattctcgggtatattactacctcgctgactaggcgtatttagacggtgttttatggcccacgttacattatcagtcggatgcgtccttcgataacgagtcatgggacgcgtaccagcgtgtaaatacgatattcgctgatcgaatcagtgaggaggcggcggatggtgacctaatatgggttcacgactatcacctactcctgctgccacgtctactgcgtgagcgcctccatgcgcaaaacaaaagatgcgctataggattttctttgcacacccctttcccagcagatgatttttggagaggtcttcctgttcagaaagcgttgctcgatggtgtccttggtagcgacctcgtcggcttccatacggacgagtataagacgaacttcgctggcgcctgcagatctcacatgtaaggtccgggaaatagcattgaaataccaagtgactaaccaatttattagtggtgcagaaattgaaggcgacaatatctactacaacgaccacactattagcattgataaatatgtcgttgggattgactgccagagatttgctgatgcactcgatgatcctgaggttcaggctgaaattcagcagattgaaaaccaatataaggacaaaacgatcataatcggcgtggaccgcatggactacacgaaaggattgcccgaaaaattgcagggcttccgagtcttcctcgatcaataccccgaatggagtaaaaaggttgtgctaatacagatcgccattcccagtcgcgaagatgtcaagaaataccaggatttggagggggaagtgagcaaattggtgggccaaatcactgggcaatatggtaagtgggtgcccacttctggtatagggtatggcaggtctgtagatttcaagctaaataacaatcagctactcccacgtcgacaccattgatctatattcaccgctcagtttcttttgcggagcttacagctctatattcggtgtctgatgtctgtctcctcacttcccgccgggacggaatgaaccttgttgcttccgagtatgtcgcttgccaagaggctcgacacggtgtgttggtgctctctgagtttaccggtgcatcggcctttatgaaaggcggcagtctgttgttcaatccttctagtgcagatagcctctcaaatgcgctttacgaggctgttacaatggagaaggaggataggaagaagatgtacgaagagttgcggagttttgtcaccaccaataccaggttagttgtttcctttcatcttctcaaattccctcacctgccatcagaggtccctcaggtcttgtaatcagcaaaactaacgcccttcagtgcgaactggacggagactttcgttggagatttgacgaaattgcagaatagatagcttttagagtagttttaactcttgacattggtcagaatcatttaattgcttcactggtatatccgactgccccaagagggctgtggtacgacgtaagcactatcaggttctaaaatcaaattaaatagtccacgatatcataggctagtggcctccgagatcttatgtaaagtactgtcaagaatgggatatggcccctctaggccctgagcaagaaccttggttattgttatgatctagtggtaaattacgctgccccaattcgtcaagtacagctttatttggtaaagcctgtctatgataggcgcttttagagtgaaatttatatttattttgatacagaatggccactgagatattgaaagtaagatagaatatccagattttgttttgattttgactgttcgatctgaggtttgtcgctcaaccggctggtcccgattacatgacgtcgtcactccaggttagtcgtggggctaggcattccacttggaatttaagatctcagtgacggcctttcactaagatactcatcgatacttttttctcaattctttagggtgcaacaacttccatgtctgatagcttggccctggtgctagttggggatgagggggttgggaaaacagcgcttgcagtgcgggttcgtcatgtatttcccctattttaatcgagataaactaatttcgagtatagttctgtttagagcaatacgccgagggctcagaaccaacgctggatgattcgtatcgcacgcgaatggtggttgatgaccggccttgtgtcctcgagattatcgacacagcgggacgagatgaacatgctgcgctccgtgaagaccacattcgcaatggggacgcatttattatcgcatacagtatcacctcgcgggaatccttctctcacgttcgagcgtactacgataacatcaaggaggtgaaaaaggtcttggcggaaaatactgtacagcagccgccttctgaacacccttgtcgcgtgcctatcatcctagtgggtatgaagaaagatttggaattccagcgtgaaatctcattcgaggaaggacggaaatttggagaatccctagactgttggttttatgaaacatcggctaagactggctcagatgtagagaggacgttcaatgatgctattagatgctttcggcaacagaatcttcccagtcctcctccacagccagcatcgaagcaatcaaagaagggccaaaatgggaggaaaatctatgacccacgcaggtgtatcactttgtaaatatcatagccgtgcagtatgaagtcagttgttatgcagggtttcgatgaataattgctctctcgtaaaccgcataccaattaaaggcatcccatgcagagtagagcgagcagccgcgaattcgggcctcatacaccatttcggccagttggcattcagcgttaaggcatccccgtttgctccggtggtactgtttgaggcacgtcctcgcatcaaggtgcaccatcactgagggtgaggttgccgcaattgttcgaccggtaagtgctagtattagcagccgatatgagaaaatggagggtcatgcctctcgaaggaatttggtatctgcgcagtcgcgggagagccttcgcggcctaaagtgccgacaccatattactcacggattccggcagagtcaggatcggtcagaggggaaaccgagcgtagagcatagtttactaatgacgagggggccctgcagtggggacaaaggggcaccgacagccctgcctgcgaaagaggtgtgagagcagagtcgttgggagtagtacctgcgaccttcctacattatttacctaagcacacaaatatctacgggtggctatcccaatctctttcttacgtgaacttgatttataccgtgaagttcactcaaatatgaacattccacagtcaaatatgcacgaaagcaatgcgcctccgctcctggccaatcacagtccacctttaaccgccatacttgtgccgatcaggggactgcggggccaggcgactgacgcggctcaggatactctcccccatcacactcatcaaaccaaacgaccaagttgagagatggcactgctgagaaggttgtcgcctgcggagagggcgagcggcacggaccgcagcgacagtccactgctgaaggaaccacggagcccctcggggccacggctgctgaaccgcgacgaagttccctcgtggtatggccataatccatacatacgaacgagttataggccagtgacaccgtcaacgtctcggtgccttagcagcctgctgtaccttcacaatgagactgtgaatgtttactcccatctcatcccggctatcataacttcgctgggcaatgggcttctttacttttatttcacagcatcttttccggatgctaccggagtcgatcagcttgtttttcatatctatttgacaacttcggtcgtttgttttggtgtctcgtctgcataccatacttttctttgccattctgcccctttcagtgctttgtggggacgtttggattatgttgctattgtattccagattcttggttcttttgtctcggggatatatatcggattctactgtgaaccacatctgcaaaagctttattggtcaatggttcgttgatgatctcaccttgtcggtcatctgactgaatttctgatatacagattggcactcttggcttcttgactgggtttgtcgtggtgcatccccgacttcagagccaaaagtggagactgttgcgattatcaacattcgtcgcgacgggactttcggcatttgcgcctatcatccacgctgctagtatcttcccctatgatcagctagatcaacaggctggattgcgatattactaccttgaagggctagccatcgtgatcggggtcttgttttatgcggtgcgttaatttcccaaactgatgcagaattgatctgattggtggcagacacatttcccggagtcgtggaaacccggaagctttgacatttggggatcgtcgcaccagatattccacatcgccgtggtcattggtgcgacgattcatttgtatgggattttggttgctttccagtggaattatgaaaatcagcgatgccacattggttgaggagatgtattccagtagcttacctgtggactccatcctcccaggctgataagggctggcccatacccaccttcccggattggaagaagatcagctatacacacatgacaaagtacattatgtcgctaaccctaacaacaacgttgaaactctatacagaactagcttagcttggccggatgcacccgatacccccgccccttgtcatttccacttgccacgttttttctcttctagtcaaaacccaaaatggagggaaaaatcgcagtcgtgagttgtctcgtagttgctcggatcgtatctaacacggccaggattccgattactacactctgaccaaagattgggagcctgaggactttcagtcgtgagttgcggatatcattcccacggtgttttggcttttaaccatatgtatcagtgaaaccacatctatcgcctcgacaatcgcgaagggtcggttggaaaatggcagacggtgagtagcagcctgtggagatatgagctttgctaatagtatgagcagataccaggctatgaaggaagatgactattggtcggtcgcgacgcttcaatgtaggaaactcgaggctaatcatagcatacaggagtccttccgatgaccagcaattcgaggcttttgaaattgggtaaatactcatttttcgtctttcgttcggttcaaacagcttatcggttatacccagtcatatggtttttctcgtgctagaccatgaccgagagaaccccctccaccactctcccatcggcaaatctcctaaggtgagagagcgatctagattgatggcaaccttttactaagagtactctagcacattctggacattggcactggtaaaggaacatgatctatgtaatcaccccacctattctctccaatgaacctcgctaacattcacctagtgatatggcagatatgtatccatctggtacataccacttcctttcttttctcctttgcgccagactaacaaacgtcagcaaccgtccgtggcgtcgacatcttcccccctccggtgacatggatgccaccgaactgcgtactcgaagtagacgatgtcctccgcgaatggacctggagagtaccattcgactttatccacatgcgtctactgctaggagcattcacacccgagggatgggatcaagtgtacaaacagtgctacgagtgagtccctccatttacatttcccctgaacagtatctaactcctatccagcgctcttacccccggcggctggatcgaacaaatggaactagacgtgcgagtgtacagcgacgacggcaccctgaaagaaggcggcgttctagcctcatggggcgataacttcatcggctgctccgagcgggccggtcactccctcctaacgcaggagacaatgcggggcgcaatggagaaggccgggtttgtcgacgtgcaggaaaagttatacaagattcctttagggccgtggccgaaggataagattctcaaggaggttggacagctccaatatgcccactgggttgctgcactggagggctgggctatgtggctgctcactaagtttggtgcaccttcgccttggagtaaagaggaggttcaggtttatctgtccaaggttcgggctgagttgaggaatcctcgtactcatgcttatgaatatgcgtgagtctgatatgttaccccaggaggttatgttgctaattgtgtttagtcgtcgagtctggggtaggaagcctacggcggaagaactggccaacccagtcaagaccgagcctagttcctaaactagcattgaaccgattactgtgtttgcgtttaccgagttcgttttgcgaagcgagtttatattttgcatgtttaagtcctgaggcatgttcgcctcaggctacgacatgattttctacgtatagtaccagaatgtgattagcttgtctgttatcaatcaatttgttaggattcaaccctgggcgtttgctccacgatcaattgagcagccttctcaaactcggcttctacaatcaagttatctaacccagatcgttcgacctgcaatggaattagccaactctcaacaacgaacaggttactgaccagctccagtcccttttcggaattagttccctgcaaccgaaccacaaccggacatttgaaaccacccatctcagcagcggcggcaataatagcctcggcaatcatgtcacatcgcacgattcctgcccctgatcagctccatcccctattgttaacgtgtatactcaccaccatagatattaatcaaaatccccttcacccgttcatcattcttcaaaacctcaaaagccttcgccaaagcctccttcgtcgccgcaccgccaacatccaaaaagttcgcacacttccccccatacaaactaatcaaatcattagtcgccatcgccaacccagccccattaacaatattcccaatattcccctctagccgcacataattcagccccaattccgcaagccgatgctcctcctcctgttccggcgctcgttcctccatcgcaaaaagcccaggctgtctatagctcgccgcattatcaaacccaaatttcgcatccagacaaacgaactcaccatcctcagtgcgcaccagtggattcaactccagcaacgtcgcgtctttctccttgaatagcttgaacatctgcaccagtatctggtggatatcccccatctcggaatccgagaatcccagctcggcttggagatactcgtcgatctcatcagtgataccggtcgagagtccgaaccggagtttatgcagcttgtcgatattcgactcgatgtttgttccgcctgccgcggagatgagcagcacgggcgaggcttgctggcggtcgaatgtcattgcaaagtagaattcctgcgcgatggagatggcttttacgatgtagagcttgtcgacgcaaaggccgtcggctggggtttgtgctgttgttaggtagtacccgagcatgttggcggcatttttgaaggcttcggttggactgatagcggtttattagattggttcggtggttatttaggattgggaactcacgactcgacgtgtcgaacgccgctttggccgtcgctgttgaatttgcctttgccgcggccgcctgctaggacttgggcttttattaccgatggtccatctgtgaatgttagttttaggatatggaatcgaagaggatggtgtgaacttacttataacggagacgacatgcttggcttgctcgggggttgtaactaggaatcccggtggaactggcagtttgaactaggttgtataagcattgaggtaggctgtgtttgtgaagggatacttacttcttggagcagtttgtgtgagtggctttcaagcagactcaactgtcgtacttgggctttgagaggtgcatagtgctgccgatggttagtatcgtttcaatcactgctagattgtacgaacccgttggaaggtgcgcgcgatcgaacgccaagcaatcatcgtgagttatatctttcatgctagggtgtcagctgtcagctccaagaccattccgaggttcgatttatgtcttttgtgttatttggcgatgacatcaatgtatcgattttggctagttcctggggttgagtttccggaagtttatttgatatgaccatcgcttgaccgtgatgatttcaagtattttcttggtgcaagtatcgagagagcaggatgaagacttcaatatagacatgctcaagactattacatggccgagtcaattggtgagttctcgacacttgatattgctcgacgtcaaccgctagcaaaatacgtcactgatatcgaatctttcccttctacatcaatttaatcacaaatctcattccaaatatggcttccttacaacgaatatctaatctctgactccgagcctgatatctctctcccaagcaacgatacaataacctacgcgagccacacgagagatatactctacggacagaagtcggcgctagtgtatacacatggccataccgtgaggtacttcattgtagtgcaccagccgtaatctgagcggagactggatcctctggctgtcggtccgttccgggccatcgttcgaagagggcaatctcccgaattcctcttgataaagcatccatacgggatttcaaggataaacaatatcgtgtaagcggggtacaaggttcagggattagccgtagcacacatcacattaatgataactcggcgcatcgcttgtcaaaagtgggggtggaattttattccagtcgtcccaaagtagtgtgttggcaaaactagcagtttcaggctgcgccgtttgcttggcttctcgtatcggtccgatggtaaattcgccagaagatggaaattggtgaattgctttttttgcacatcgtcacgcgaccaagtcgcactgaccgcggggatggatgatgcgatcggccgcattggggccatagcgctgtcattgcaggtttcgaagagcctcaatctgtgcgcaaaattgtgggaatgtttcagggaaagtcttgctagaacctgttatggttctggaattcattttttcttgaaatgtggtgtaattcgtagtggcccaatggggatgtgcttctcacaggtaacgagaagccagtagttaaatccactagttacctttcttttctttgttaggccccaaatgctgtatcaatctagacatggtctatgatgactgtgtccgttgcctccgggtggctgcaggctatctctctgtctgagtaagacatctaacctcgagcacggcatcttactgtcaaattggtcaattagtcaagtctgtactcatctgatcgttcccaaaatctgacagacactagtaccaagaatgttttagcagtgtttcacgagtactccgtatgttgtatatcgttttcttcccttaaatggagaaataaggccccgcttctttgtatgaaccccgtgcttttagaccttgacagccctcacgtaagcgacggggcgcatcttgtcccgaaatgagactttcaatagcctcacgctaagaattgtgtaagaatacccgaccggccgagtcgcggagaatcatacccgggttcgcctggatgtatgccatggtcgatgcctgtagataggtgccacgcgggtaatcggaatgcgcgcagcgttcattcgccgacacaaatgaagtcttggcttcgagacaagcaatggacgtataacctgataaggttaaaccacgttgacttgggcgaaggtggaaattgcaacgtgggaggctatgcctattcgggcttagtcaggcgtgaccagcctccaagacaccattttctcccaattcagagatttcaatacaagttcatatgatatcagcgctagtgacgagttagtgaatgcaaaatgaaatcataccgagatcgccaggggtacgcaccacggagaatatacacagcaggtttggcttatcaccgtgaggcttagataggcgatcgcccctgagagcccagccacccagtgggcctgacttggccgacgcagagtttctggcaaatcaaaaggcaaagaaagcacatctgatcgctcgattctgacgctgaattttgtttagaaatataagaaaatggccatttcctgctgatgttcctgcaaatctccctcagtcatccgtcaccatgaggcagtcgacacccattctctgggttgtccaggcttgtctagtatggctgacattggtatcggcatcgcctgtcggttctcctgatctggtatcggacgtcgcgcttcaggcccgtgacaccaagccgtttccactccggattctgcccctcggtgcttctatcaccatggggtacaaatcgcccgatggaaatggatatcggaaatggcttcgacagcaattgcgctatgcggggtgggaggtggacatgattggtactatgaagaatggtacgatgcatgataatgtgagttacggttctgttcatcttaagaatatatactgactcttcaggaccacgatggacacgtcggctggagaatcgatcgaatagctgatcatgccaagacgatcatcccacaacaacctaatctaatccttctcaagtgggtctccgattgccgatgccatctccttgcatgctaatatgtatatccccacagcgctggcacaaacgatgctctacaaaactacaaagtaaataccgccggcgagcggatggactctctcctcacctacctcttcgacaacatccccaacacaaccatcatcctatcaaccttgacatacaacggaaagaagccgaaacaaggcgcatccatcagctcgcaatacacggaacttgcagcgaaacgccgagcgcaaaacgacagcctcgtcttagccgatatgagcaccttcattcggtataaccaattagtggataagatccacccgacagccgcgggctatgaggaaatggcgtccgtgtggtgggcggccatccaacaagcggagaaggaaggccttctcaaagcgccaaagactacctctacatatagtggtacgatcagcaaggcccgcgagaaggcactcgacgatagcacttcagacccggatctgcctgcgtacacggccccggctcagcctaccgtatcacttggtagcggctcgcctcgagccgagtggcatctctggactgcgttccagattatgagtatgttccctttctccctgtgtgtttgacaagactaaccttatcagtgggcattggtttctatatgatatgatgggacctggaacaaataatcaaaaataggcaaaacaatttaaaacttactaaatcgttcatcccagcctcataagaggcgtgcataagtctaggcaaataagccatgctatacctaacctaacgaaaccaacccaatttcatcactaaccaaccccattaatagaagcatatcctcttattaacctcggaagcacgcagcctcccaagaaaagcacaagcagtctccactatcctcggcctcgaactccaaccctccctaaccctagactctggccgacctcttcacctgtccccgcaataggctgcgtcgtccggatgccgtgcgccagggtacaggtccaccaaatcagaggaataatatagccgacatatcgcagaggcgcggcatccgggttagtgtggggtcgctgttaccgcgtggcgctgtcttggagtgtggctgcgatgggagttcttgacgggatgtctatgggattgcaccatttctaggcagatcaggttagttctagtgctcggaggaaggatgttgctgtacggggaaggccgggagtagctctcgggtgtctcgttctgaattcttttggggtgggtttgccgcaaaaggcccgggcgtgtagctatccttgcatggatgtcaatgcgcgttaatcgcatgtaaacttgatcacataactctcgccaatgagataaatgtagacgatggacgtagaaatcatacaacacacccggaatgtgagcgacagcaatgtcaacccgagaaattcccggccccgcggcccggcgacaaagctgaacttccaacctgggacaccatgacatcaccacctaagctccgagaatattatttcaagctcctacacttccgcacctacaacatcctctctacagacctctaaacctcctccctctatccaatccccccaaaccaaacccaaaatggccgaatcattcgctatcctccgccaacgccgctccaacgagctaaccagcctcgccaacgagcacctccaacacgacctcaatgccgaagaccgcgacaagctcaacgcagcctcgagatcaatctccacgtggacggccattgggtccggcgtcggtattaccctcggtcttgtcgccgccatccgcttccgcaactcgcgcaaggcgttcttctcagccattcgcgcgcaggatagacctaccaaggttatgtttgaggatggacggactggtatgttattttgattgtaatgaaacaaagatcggtattaatttgtgtcttgtgtgtagaggctattccggacctcacgccgctgttgaagcctactactctcggtgatttcgcgacttatttccttgccgcggctggtgggttgttcttgggtggagagcttggtaagattgtcgatcgtatgatgccgagttgaattgtgctaatggaattctgtaggctttgctggtggtgtggcgaaagggacgtggagtctcgacgcggatccccagagcaaggagagaattgagactgctttcaggaaattccgcgctgatgtgctgcggaaacaggctgatgcttttgataagggggagaataattcctatctcctctagggaatacatgtagacataaattggatcttaggtgtacacgattttgtaagatgatgtcagttattttcattcgcaatgtcacagtaatatacaagttataccttcaaagccttcaagaatgccgggctctcatagccctgcgcaaccttcgaaatcggcgtgagatacgcctcggacgattcctggctttcctggatcttccgaacatagaattgcgcaaccttgagccacatcgccttctcactcgcactggcttcagacccctgccaaacccagagtctgttcccagcatcgtaaaggaagacatctttaccatccaagtcagaccggtcaacccgcccatccttaacaagatcaagcgacaagtccccagcagcatcactgagtctgaacagcctgcgcgagcgaacaccctcatcaacatccttcttcgcaaagcgcccaggtctagccgcctccaacgtcgacggcgcgacatccctcccacccagcaaatcaacaaagatcttcgacctcgactccagctgcgacagcacctcaacatcaacatgcttcgcctgcgtcatatcattaaccacctgcgccgccttcgccttctccatcggactacacttcctcccctgccaaacccagatcttatcccccttatccaaaacaaacacatcattctcatccagactctgccatgtcggctcgacctcatgcacgatcaacgaatccacacgcgcaatgcctgggtgtttaaagatacgcagtaacgtcagaacatcctcccgcggctcgtgttcgacatgcgtgaatcccgagcgcacaccaccagaccggaccgcgtaattccggaacaaagcaaggaactcgtcagaagggtgttcctgcacctcccgatgctgcgtcgccacgccgtgcaggaactcgtccagctcggcggtcttgtaagccgcgacgccggcttcgtcttgtgtggtcttgctaccgagccagaagaagatgtcgtaggcgagcttggtgtcgaccttgtacgtgtgcagcacgatgaagctgtcgccgtcgtagaactgcccggttttggatttcggccacgggattacttggaagttctcgatgcgccagatgctcaggccgggttcttgggggaggtcttgccaggcgggttcggtgagggcggagttgtacttcacgcggtggtcgatgtcgctgccgattagctcgacgttgctgtctttgatgtcgtattcttttgggtggatgaggccttcgtggggtgccatggttgcgattggtgtctggtagctgtgttgtgtatgatacaattagagctgaggtgagtgttgataaatgataaagtgatgatagcggtgggtccatggggctgagccgcggggcatcattttttgggagcaattggccaatgacgtcgggaatgttcgagctactatttttagtcagtgcaacagacgtgatgctatgtttacatgaggctggtagctgtgggagaggctggatagagggcgcagtaggcgtttgagccaccatcgtggcatgtcagaagagatttttcatattttcgtcatccgttggtccatctgagtctgatttcaattcagaaagtgctggtgacagctacagctggatattaggaagagctcatagattgaacagcgaggttcatttgagtggacaaaatggaagccgacgataccaacgtgtcatgctatgccctgacgaaattttcagcagaaatttcatgcgcgagaggacacgcagcaatgtatcccacctttggggctaggtcgaggtgatatcactaatagatgtactccgcacaagatgctacattgatcaagtttaatcccaagtcctgcagcttgcatcaagtcaagtcagagaattctcaaatcctcatttacaaataaaaaccaattggtgtaaatcagtgcacgaatcgatcggctctgaactgaaattccaaatgtcctgaggtatatgaaacaccgagggaaaatagtatctacttctcataactctagtaactgctcgtgcctgatttcccagacgcacaaagcaccgttaccaacgctaagcgtcaatatgtcacgttttttctcgctcgcataaccatcgcgcacttttccatatcactgatcacgtttaccaacggccaccaccggcaccgccggcaccaccgccgccaccgaagccaccaccaccgctggggcgggcgttggcgaggttgacgcggatgcgacgaccatcgagactggattgtattagctgtgttcgtagtatggaggagggataacatactcctgctcgttaagagcgttgatggcagcctcggcctcctcagcggaagagaaggtgacgaagccgaatccacgggagcgaccagtctcacggtcaaccatgacgatctagagatggaacattagtgtcttgttccgaagcaaaaattggaaatttgtggatttttcacgtacagagtcgacaatgttgccgtactcaccgaaggccgcgcgcagcgactcgtcgctggtgtgccatgaaaggtttctagtaggactgtcagtataacgcgtccagcatcggaatttgatggttttggacatacccgacgtagatcttagacattttgaaagaaagtgggagtcacgaggtgttgatgaagagaattaaaagatgcggggcatctgaggagatatagggccttcgtggcggtgagaggcaaaattcattcgccccgcataaaaaagtgagcacgtattgccaggaggcgaaggagcagactctgccggatagaccagctcattcaatgccattttgagattggtctaattctaagcattctgccagattactattccccaatggagtctcccacataggtagctacatatgatctggtcttcctggacgcaatggcagaatttctagcgaacaatggcctgacggtactggaacccgacagaactaccttactactgtatgatcaacagacctgatcttcttactaagatggatcatgcattcgagcatggagccacagcgccaccatctagaccggtaggatgaggtacagaagtggatatggtcaagtcaatcttgcatacgcctccgatggaagatacatccgtatgctaaaaaacagcttccctacaattctccaccatctatctgcacgagcaaaaacaaaaacatacaacagtgaggattcgctggtggtcacccacccaactactaactcaccggcgtgtggcttaagtacggctgagcggacgggaagccctgttttccacaccctatggtcgtatgtatcagattatgtttcgaggaggattatagcagatggctggtgagtgttacgtaggatgggcatagtgtaggagccctaatttttcggggatattcacctaggactctgaatgggaagccaaagctatggagccactgatgagcactaacactaatgacggtaaggatatgttagtcctgcccgaactctcaaatatcagtgatgacatacctatcggcgagaccgctttttaatcatcttttttgggtgtagtgcgaaggcaatgagatgtaatcgtggattgcaaaggcgttgcagcggcttctaaggtatgaagggtgctatagagggatagtagaagcgtgtgagattcgtgatccgcttttcgatgattatttctcgactgtgcttggcttagcggcacagtctgaaaagctgagcgtcgtacctatcgatggttcacttgaagtggaaacgacgatggaaattgacctttttatgggtagagatgaagtttagagttttagcaaggcaaggccgggggtggataatatctcggatatagaatagtaaaaagaagctaggaagaatgaccgaaaatcgttctggatatccatcatgagttggcgagtgcgagcgaccaaggtcgaagtggtaagaagatgagaagaagatgaaggcaaaaatggagctgtgtcgggctaatgcattgaaaataaagtgccccagaatgatcactttagcggctgtggaaccgacaagtcgttgacctcttgaaatcgcgggaaccctggaatatgtgctggctagcatgcaaaaattggagattggctttgaaagacttgtaaatgtaacgtcatggtcatgaatcttggtcggcaaacttcgcagttagtctatctacgctaggcccctcttcactgaagccggaacccaagaacttcaagtatccccgagattcaaagatgcagccacgccacaaactgcctagcagaccttctcgcctaggtcagagcattcctggagacgaggagtctcgtctgttgttgggaggtgaaaagaagaactgggaccaaatcgagaaacaagaaatgagcagagtaaaacagggagtccggagtttctgcatcaaaatctcctcgattccatctatcctttcccaaatcatcagaaaacgcactagaatactttccctagaagagagtgttctacatgatatctacaagcatcttcccctggtcgataaagcgtgtctatcgcttacctgcaaacaactttacgatctatttggagcaatcttgaaagaaaaggaattggaattcccacgacttttactcattggtatccctatactatatgtgaatagtagcaaagtcccacgaaatcaactgctccttcgacttgagagtcgcaactgggcatattgtggaaggtgtttgaagctccatccccgaaaggaatttattcgagagtcgctcgcgcgcccagctttagagaggtcttgcgcagactatgcgggtatagttgacctatgccggtgtgttgccttgacgattcgagacctcgggtctattgcgaaactttttagtcgccctacgccgggtcaaactaagttcggtccattcactttttaccgtattggatcttggcctttcttgagacactcttgctcattacccactacacctgactacaaggctcggttcgcgatgcgtatatccctcaacgagtttaaccagctggagatgtctgctagttatagcatattcttttcttcccctgagactctaaaagccgtgcccatcttccactgtcctcactgggaccttactactttgatgggtcggaaggatgccacccaggtgtgtcctgggtgtcggaccataagtataagacatcgtcttccagaatccaaaggaaggaatgtagttgttttcgaagtgtggcggattttaggaaaccgtagggcaccggattaccgttggcttgataactgtcgtctcactgggccttcatatggacatgatatatccaggtaagtgcatggttgaatattggactgaatgggcttaacagcattattctagggaggaaagctcgcaaagtgggacgcgcactatttatgatacatgggagggtaaataccatggagcccgattttgccaacaggtagacgggccaacaccgacacttgattacaatatggcaaaaaaattgaaaatcgcatacaagcatgggctcatttaggtagatacagtcgaaggggactgcaggaattatactactcgagtgttaaattgaggtaacttctatagcctctttgctattgtatctcttttgggccttatttttccaatgtaactgccagcaaaggtattgctatatactacggttcatcttcttttctttctgcgcttgtgtcttgtaatacagctaatggctttgggacatgtcatgctggagcggatgtgttgtttcggtctaacggccaccacagccaggaggtcatgtaatcacttcttgatagagcatatgcatgtacccacgttcaattagaaaaggcaaaaattatgtatttcacggtttcagtctgcgaaaaagggatggcctataattacatgagttaaaaatatcggatagggcgcagaaagctgaagccggtaggttggtgatgctatgcattgaagctaccatattcttttacttactgtgattccaatatcgttcgaatattattcagcttgggtcttcatgcggagagaaaagaaaaagttttatcgagatcaaaatgaggcgttgggaaaattccaaccccaaatatgattatcgtctctgtgtagaattggaatgagagttctaactatatgagagaaaggaggcatatattcttcatgtttggcttgtaatgcacaattccaaatattgggatatatgggctcattcatcttcatcgtcactccttgaatatattttgaatatattctcgagtggtcagaatagaaaggacctaatagtactatatacaaagccctctgatcgaactagtgcttggataactccttccaatcaaacccacaatgcggtggtacaccactgtgactagtgagggtgggaacagcatcggctttgtttatttcaccgcatccagctagcaacgtgatgaaggaaatgaaatagttcacttttcaagagaaataggacattggcacaggctggagattatcaagtcgatgataacctagacagaacagtgccaatacatcgtcaactcatacaatcagccccaatattatctgcatgctgttgtaggtgaacctaccggggagaacagtgagggatatgacgaagcagttatcgttcaaagaggccaacctgaagaaaggaccagcggatatatttccgccaaaccattcacgccctgactctgcaagtcgaatgcaccggagtggaagcatcagatctagatggaaagtgtagctcaaaaagaataatgtcacgagttctactccggttgattatctcatctattgcccggatggtctagtggtacgttgcagtctcttcctcaagtcataaatttccttgctaatcccttctaggtggctttggctttgacaccgagattgaagcgtcgtatgaaaaggagtgcatgctcatagtcgtaatacatcgggtcactcgaagtactgtttcatcttcggctttttctatcacacacataggcagtgcctggtgcgatgcgttttaaaagtctaagtagatggttacataaattatgaatccgcctcataatctatcttccgcccggatggtctagtggtatgattctccgtttgggtttccatctcaaattcggagaggccgcgtgttcgaatcgcgcttcgggccctcattctttttttgtttgtttttgtttttgcttttcattatgcaatatccacctctaatttttcaccctctgcaatcccactacattgactgacccttttagctcgatgtctaagctatcacgatctagctccaaaatacggtgaggtgtctacgggctactgcctactccgtacacggcgaagcgtccggcaacctgcagcgagtggacggaaatttccccagtctgcggggaaagcttccaaattacgtacaagtttagctgttgtcaaaagcaagaggttcaggctatattccagaatacatagccagccagtctttccacattccgtgtctcactcgccaataaaagggagtggtccgaggccatcgtggactaaccatacatagtattaacctgcatgtttcaatgtgatatatgacaatgcaaccagtcgtgtgtcgctgtacatgcggagctcaccttgcgctttcttggccagggaaaaaccccttcattctagtcatgggttccaaatctagaccttggccggcgttggagaccaggggggaattccaaaccacgggaatttaaacccaattctcctgtgcggggattataaagggtgtacctgcccgccggcctagcagtaaacattgagcgaccacccacagcaaacggcgtgatgcagaacctttttctctctgctctggccttcagtgtcgcagccgatgcctatggctcaggggctgccggctgggacgcggcttattcaaaggcccgagcggtccttcccaagctgaatcagaccgaaaaagtcgggattgccactggcgtcggttgggaaggagggccctgcgtgggcaacacttatccagctagctcgatcaactatccctctttatgtctacaggactcacccttgggaattcgctttgccaatccggtcacggctttccccgccgggatcaacgccggagcaacttgggaccgtagtctcctgtacgcgcgcggtgttgccatgggcgaggaagccaaaggtctgggcgtgcacgtccagctaggaccagtcgctgggcctctaggaaagaatcccaatggcggtaggaactgggaagggttctcggtcgacccgtatctcagcggagttgccatggaagagacaatccagggtatgcaagattcgggcgttcaggcctgcgccaaggtacgctggcttccactctgttcatattcagtgcgttctgaccatggtaaagcactggcttgggaacgagcaagagcacaaccgcgataccatgagctctaacatcggcgaccgcgcgacgcatgagttgtatgtatggccgttcatgaacgcagttcgggcaaatgtcgcgtccgtcatgtgctcctataacaaattgaacgagacttgggcatgtgagagtgatgctatcctgaacgatctaatgaaggacgagctaggtttccctggctacattatgaccgattggaatgcgcagcacactagtgtcaacagtgctttggctggactcgacatgaccatgcctggcagtgattttaatagcccgcccggcagcatattctggggaccaaatctcgtgcaggccgttgctaatggctctgtacctcaggcgcgtctggatgacatggcaacgcgtatcctggcagcttggtatcttcttggtcaggatcaaggctaccccgaggtgactttcagctcttggaatggcggaaaagccgctgccgatgtaacaggagaccatgccactgtcgcccgcaccgtggcccgtgattcgattgtcctattgaagaatcaggaacatactctgcctctacggcaacctaaaagcctggctattattgggcaagatgccatcgtcaatcccaatggtcccaatgcatgtggagaccgcggctgcaataccggcacgctagctatgggctggggcagtggcacatcggagtttcccgtaagcaagccaatgccggcagatcaaccgcgagtccgataaactgacaatgacgctctagtacctcgttggtcctctcgacgcaatccaagttcaggccagaaaggatggtacgaacattatccagagtacgaccgacaataccacggctgctgtctcggctgctgcatcggcggagactgctgtggttttcattaacgcagacagcggtgaagggtgagtcggacttgtaaccgcacctatgatgcattgcaactaacccgtgcattgcagttacattacagtggagggcaacgttggtgacaggaacaatctcgatccctggcacaacggaaacgagcttgtcaagtccgtcgcagcagtgaacagcaacgtcatcgtagtcgtgcatagtgtggggcccattatcctagagaccatcctagcgcagccctcagtgaaagcaattgtctgggccgggctaccaggtcaagaaagcggaaacgccctggttgacgtgctctatggcagcacctctccaagcggtaagcttccttacacgattgccaagcagttttcagactacggggccggctggaacagtgggctcgatgacaatttcgttgaagatttgtttattgactaccgccacttcgacaagaacggcatcgacccgcgctacgagtttggctatggcttatcgtatacgacttttaattacactggacttgtggttagcgttgctgccacagctgggccatcaaatggacgaattgtccctggcggggcagaggaaattttcgagtcggtcggcactatctctatcggtgtcgaaaacactggcgaggtagctggtgctgaggttgctcagctctatcttggcctgccggactccgccccaagtactccccccaagcagctgcgagggttccagaagttgaatctccagccgggagagccgggaacagctactttcgagctcactcggcgagacttgagctactgggaagtgcagacacaaaagtgggttgtacctagtggtaccttcattgtctatgttggaacctccagtcgggatattcgtgaggatggaaagttcactgtcacttagtgttgttctcatgctttggcttgtatatatttttattcggaaacgacttgtctcttgatgaatctgcaactaaaccacgactcaatgtatcgacagtttctagatccagacttgcttctttgttaaggttcgtaagtctttacccaatgaatgaccctatccctaagacaggtttctgtggggtacaaagaatgaaagaatgagctttgtaactctcccttttattatcaatgatcatagtattaagcaacttattcaaatgtatataataacgattggtataaataacatgttagtccttctcgaagtagcaaaccatcatcatcaataccttgatctatctcggcgactaacttatacagatccgcctgtcctatatcatctcaacgatttacccatctccaagaacaatggcttggtggaacagctctacacccggctgggtcgaaaatctcgtaccgacctacacacaagaaatctacaaattccgactcgaactcgaaggcgagattcagattctagtgcgccacccaggccatcagcatatagtaagccagagacttacgatgacagctagatccctgcgcaagatcaagacactggcgtctgatatctcggtgtatttcccggaccatccattcgtcacgcgcaaacgccttggtttctttcagactactttcccccgactttgcgattttatcgagcggactttgattgagctgagtagaaccctgattcatgatccgaaaagtgagatttctattgcttggcagcttcaggatatattggattctgtatagattgggtatttaatgtttcatactattcaaaatacttctatgtggtgaatttgattttatttagactatcagcatagatgattctacttattctcgctgttgagtcttttagcagcctcatgcatgtcatggtatatatttcaagcctcctattcccgaagttttcacaaccattgtcaattcaattcaatcctatctctagatttcgcctggaataattgctagcgaaaactcacggcatttgaacaatttgattcgtatctttttcgttgatttataaacatcccacaagcttggaatgagagtgcaaggaggctgggagtttgcgatcaaccagcccaatacaagtatgcgacagagaaaagccccaagacttggatttgacatgaaatctgtataaacaattttagtatatcggaatatagtgattttgaatgtgttgttacaaacttacctgccaatagtactgaggcttcagaaatgccgtggatgattatttctacaagtctaacaactattctcgatcatgtacaattcgaaatacctcaagtggaatgtccttagtaggattcctcaaaacaatgatgtccttcacatacaaggacaagacctcgcgtgagtccaagccaacttagaataatcccaagctaggccgacacgattaacatgcatttccactccggtcaattgggattcttacttccaattatatctgcctgtctgtttgcttctgtcgaatctaaatcttcggaacatccaagatcagccttcacatttgaccagctctggaaactcgagaagggcttctgggattcctttctctaccctgcaaatctcaaacagacgcaaggcaatgcatcgactattttcgcatcagacgtgagtttctccagtttctccctctgataataatctgacacattacaggtgcaaggtcgtgtcgacatcacccgcaccttcgacggcgacgagctaaaccgcgaatacatcttcggcctattcgccgatccagagcacgtcagtcttgtcggtgtcccgatcgcatataacatcactcaatttactgcgaacgacaacatcgcatccgcgacaaccgttgtcaccttcaacgcaaccagtttcggcgtccttatcccagtgacgatcgacacatggatcgagttcaacgccgacggcaagatcgcgcagtacgacgcaacatttcgctggtttgagtacctactggacttcttagtcgaaggagtcgcgacaaaaataaacgcgactgagcccgaccaggctgttgcctatgttgctgatttgctagccaccgcgatctgtgatacacatgagcagcattgcacaggttcgaaccagcagtatacagacaccgcaagttgttatgactttttgaccaagactgtgcgatttggaaaggcccacgagctgggtcgtaacacattgctgtgccgcgaggtccatgagcatatggtgcagtaccggcccgatgtgcactgttcacatatcggtcctggtggcggtggatactgtgttgacgatatggactacatgcagactgtactacagagatacttcaatgactcttggattccgtttggctatgggacagatcagaatatctggctcgctgattgatgggagaggcctgctggtaaatgtgggggaaatgatacgaaaatcgcgtcgacaaacccaacgtggtgaatcaaccgagatggactgcgacaacaattatgtcactcttcaggtctgcagtaagccatgatcccgtgtcacaagcaaattgaactcaaggttttcagaaacatgtactcgggtccatgctctatataccatatgtcattagaatcctgcgccagccaaatatagtatcacgatcttctaggagtgtgaccacggggaactgctaccgaactggggtgataacagattttcgcggaccatagtacgggctcacggacatcatataggcatgccattatctgcgccatcttgcgtgctatgtcacatcagacacgagatcattggcgcttttatagccccttgatgataaggcataaaactcctagctcatcctcagcctgacgtggcactgcactacgcggagttgtattgaacaaggggctgtttactgatctgcagatctgcagctcggagctttatgtgtgatatcataggatatacatcggcacaagtctccgacgtctccatcctgatttggcggcgatcatattttacattccaatcccttcgcacgtccgtttctagccgtgtttgatgctgccccagcttacaatcctccgaagagctctctattccctacgtaaagcacgtcagcgtcggccttttaaaaacgttgttttgtttaaagcttcaaagtaggggttgggttcaatatcatactccagcaagtcacattcaccagtgcgttatcataagtacatacactacatcgggatcatctgcccagcccgattgcaaaatcagcgatgtggttactcacaagctaccacccgtgtttgaggtagatacacaagtgtataattcccgctcggccgttgaagttgcatgccagccttattagtctacgtacggaaattccttccgtcacctggctgatctttaccaagcgttctcgccatcccttcgaacgctagacctccttgacatgatcaaacaatgtgaccataacttatggcttaatttagatgcagttaaaatggacacattcaccgttagaacttgcttttttgtctttaacgtccctgtctatccagaccacagaattcaacatcaccaatatggagagaagacgcccttcatgcagcgactcactgcctcgcagtgaagcacagatacgcttgttccccgagaaattcgacgaatcgtccacggacgatagacaaaagttaccacctgtcgacggaggtttccaggcatggatgttcctgatggcttgtgtaatgttggaggctttgatatggggtaagtcagcttgcacgactctaggagatgacagccgactaacatgagcaggatttgcttttgcattcggagtctttcagaaatactatcacgcccatgaagccttccaggactctaacatggtagctgttgttggaacatgtgctacagtgagatcaccaactgcttacgacggtctatgctaacacaatcgacagggaatatcctatttgagctgtccactagtcattattgctatgatccttcttcctcaatggggacgctggttctcatctataggagtgataataatgtgtctttccctagcactgggttcattttcttccaatatcactcacctagtcctctcccaaggagtcggcttcggcatcggcgggtgtatagcatacagtccatccatcctgtacatggacgaatggttcgtccaccgacgaggactcgcgttcggcataacctgggctggctcaggagtatccgggatcatattcccgattgggttagagaagctattgaatcgctacggattcgaaacgactcttagggtcatctccgtggtggtgttcgttctcgctgcaccttttatctactttcacaaaccccggcttccggtcagaaaaacagtcgactatcaacgtctgaacttccgcttccttaccagcaggatattttgcgtctaccaactcggcaacatcatggaggcattggggttcttcttgcccggaatttatctgccgacttatgcccgtagcatcggcgcctcggattttctctcctcgctgaccatcacgcttttgaatctggcgtcggttttcgggagtgttactatgggccatctggcggatcgataccatgctgtcacctgcattaccatctcgactgtcggcagtacactggctgtattcttcctctggggatttgcgacaaccctgcccacattgttcgtcttttcgatcgcatacggtttgtttgcaggctgttactcggcgacatggtcggggataactcacgaggtccgacggatcgacccgtccgccgacgcaaccatcatcttctcggttattgcctttggacgaggaattggaaatgtcgtcagcggccccttgagcgaggctatactcgaggtagatccgtggaagggctccgcagcagcgggctatggcagtggatatgggctgatcatcttgtgtacggggatcagctgcttgttgagcggagtatgtatagtggcgcattatatgagatgtatataggcgggtctcgttgcacatttatgctgatgattaacgtctgcttttggtgggacaaaggatggttaagatcgctacatatgctactgtttcgaactgatgggctgccagtctatcagttattttcttttccctttgagcatgacccctctatgttcaattccaatttattttatgcatagctcgatttatacaaatctcggaaaggcttgggatttccctgaaaagttaaattgcgatatttatagcggtccgccagcatccgggtgcgaaggagtatatcattctactcgccaccatgattgctagacatttccatgccgatattcagggactataatgctagtaggtcgtagatttaagatcagaactagtcatgtaagctttaattctatgcaacagtcaaagttttatcgacgccatcatccaagtcaccggggtcgaccgggtaccctgatgatctcacccactccattttggatcttgaatctccaagcgtcgatctctatactcttttatatcaaaatcatggcccaagcttggcctgctcagtggtcgacgtcatcccacaaggctacggcaatatggattccaccacaccctgctctcacaggttgatattgtggaccatgacgccaatccagaggaaacaaccggttcttcaggaagtatacttcaattaacatactcggaggctgccgcatgcgttgcgggggcgatcatgactctagaagactcggagattgcgcggttttatgggctataagggtatttaactacccatgcacgtagctagtcttctgttcttcacaaaaccttacctagtcactctataagctacctctataagcctcctcttcagagaccagattactccaagcgcaatgcgtctcaacatcgtcagcctcctcctggccggagtcaccgccacctcggccgccactactactgctgccgcaggcgcagcctcaacctgcgtgccctcatcttctgataccactgtcctccaattcgccctaggagtctccaacttcatcggcggctggtacaactcgaccgtgaacagcaccttcggcaacaccaacaacgccacccttctagcttatcagaagatcctcttcggcctggagaaggacaacacgctatccagcgccgccatcgagaaagtcggcgccaaggcccccggcttcaccgcgccccagtgcacctacgttttccccgaggtgaacaccacccagacctgggcacagtgggcctaccgcttcgaagacaccgtcactggtgccttcatcggtcttgccggctattccgactcccccgaggtctccttcctcctggctcgtctggctgctgagcacagcgcgcactctgctttgattggcagccgtgtgaactctacctactttgcccagaacactacttctctggtggcggcttacggcccggctcagatcttgtctactcgtaaccagactggtagccttggcgcgtatctgggtggttgtcttactgcccctactagcccttgtggcacgctgagaatcggacctttggatgctactccctctccttcctcttccggtgtggcgagcaccagcttggctgctgccaagaaggcttagaggtcattggttgaatgaaatatcaaactttgggtttgatggaatgttgcaaaatataggattgtgtattaatttggtcaatttgaggaggaatatcgctgttttaacagaacaggatgaatatatgacatgattaatggattaaatgggaacatgtcatgacactattgttctataactacatctggtttaaatttgttaatagacctcgggaaatcgctcgttgagtctcgagttagacagtcaatcatgatgtcaacgaccattaaaggaccaattgaatataaaccaagtattgtttgtattgcacactcatgaaaaagatacctggtttattacctagaatatttacaatgtcgtaaaagaccccgtctgctgaagattcttaatcctcccaagcaagaactccaactgcctataagccgcgccgggagtgtactgtgggatctcatgaccggcagtatagaccgagctgaaggtcagaccacgctcggtatgggccgttccgagaataccgccaccggaatcagcagtccaaggcgtactccccgccccattagcaatatcatcgagagcagtcgtatacggcacaaacaatggcccgtcaggaggtctctggaatccctgcgctccattccaagtcatattctggattgtagcgagggttccgttggcgaagagcaggtaatcgtaccagccatggccgatgaggacgttattggtgcgctcgatgacgctagggaggggaccgagtgcgctgggaacggaattatcgccgtcgttgaagattcgggggccgcagactgcgtagtttgttggtgggatgttgagggctgcttggacggcggtgctgttgaagtagttgttgggtccgccggctaacgaggggaagcccatttcgtcccagaggaaggggcagaagtctgttaggtggtacatgttgaagcaggggttcacgtagattgctgcttttacgatctcgtcccagacgtcgcagccgggcttgttggggtctggtgcggtcgggaagttcttgggtggggggtaggttagggctgtgtctaagaatttggtgtagccgcatttgtcggcgcggtggttgatttctgtcatgaaggtgtcgttcagtgcgaaaacggaggagtagtggttcagcgctgccactgccggggctattggacatggttagtatgaagatttttgtggtggagcaacaactgaccatagatcataacatcatcatcattaatggaagggtcgttaatctggatgcctttgaggttgaaatgcgtggtatcgttgcggtttaacatcccgtctgccagatacggagtgtattggcccgcatagctctctccagtgaggtaaatcttgtagccctccatgctgaaggttttaatgaagcgctcccagaagtcgttgaattgattcgaaacatcgatctcattttcaaccgtggatggtccgggggaaaagcccgtgctggcaggctggtcgatgtagacgatgttggtcaatttggtccatgagtacgggttgcgcacaggctcgtacactccagattgccataggaagggtccattttcttgtaacaggccgtcaagcgagctgcatcctgggcctccattcagccagatggtgatcttcgagaattagacgaaactctgcgacggattgaaatcacgtacctccttttccgcagctgggttggtagacgggaaaaaccagaagaacaagctcgattctccatgaggcttattcgacaaaagaccggcatagctttcgccgatgtcgaaaggaacttgtgggaagtgagttccgttcacttggaattctagaagaagtggttgtaagtgacagtctcagatcccaccaagacatatttgcacttactttccgtcttgttattcagatactgatgctcagtcaaagcagcgggaagctctcttttgcgcagaccgttcgcaggctttctgaaagatgcagctctgccatgcggattttgtaccgccgtggccacggccaccaacgaagtaaaggctgccaaaatcaacattattcgatgatgctagagaaccagaattgaacccaagagcacggaaatctgcttttataaccccatcgaccctttttcaagacgctgctactcggagcgatttgcgttccgtgcggatattcacgcattaccaagctttgccaatagagatcgtggctagttgagacaagacccgctgtgaggcagacattggtcgctagccagcgggatctgcagcgactgcaacgtcgtcaggaacaaccggcatggcgattaattgcacttccttttactccgacggagtccgttatccagcgtatgatgcagatgcactcgtagctcggcccgctgtccataggaagatatcagtgcatgtgaatgccatgtttactgagctggtacggtcgcggtggggcgagataatagtatctagtatctaggtcttttagtgaaggcatttcataacgtcaaactagatgtcaatcctgctgcctgtactctatacccgcagggtctcaactcggatcaaatcaatttgataccacccgaaggttcatgacacatcctgagatctaccaaggtagataccatcaatgtatatttccatcgcatggataatgggttctattggatatctggtggattttaagatctaggtgagggggagtcagaatgagtactccgcactccgcatgtaatgacatcctaggcagaaaagatcaggcgacaagcaaaccttaggcattcaggcagcaatgtattcaggcaacaaggcatcgaacacattttaactatgacgtcaatttgtgcgttttctcgacagcccaccagatcggctgaagtatgacaccctacatcgagtagcacacatataagctgaaaatatttacctgtaactctgcagcgataacgctgatatgctagacctcggaatgtcgaatgtccctataacagacaagatgaaagctcaatctaatgggagtgcgatcataattgtttcttagtacaaagtgagcagagagaggtgattacctgtttaggaagcggatgtgtggggaagaatccatccaaggttcaaattaagctattaagctcgtgatgatgatatggtgaggtaactgtacattccgcagccctccgctctacgaattaggaaggaacccaagctgtcattattatcaatgtctggggatggaatgggggactcgtgccctgcatctctgtctgtgaggggcatacacccgaccggcacggtgtaacaggtgacattcctcgatcggcggggttgggtatcttttctatatagatctgccatcccagagctagatcgtatacatccagggcaggtggggtaattattcagggtccaggggtttgaagaagctgaaatgggcccttggcctttcatttgttgaattacatacatgattaatccgtatagcattatcaatatcgattaaacaaagttgagtctcccagataatataaccgtaaactcccgaagacaaatgattaacacatgaccttttcccgtatcccaaaattgaaacccaaccgaagcccgaaccccgaatcccaagcccattccgatattacccatcgtcaatccgtgatcatcaattagtcgtcaggtcgtgaattgtcgagacccgtttaatgagtattgcgtcttttcttgagtcgcagactgattttctttcgtagttcagagaacgggttcaccaaaggacgattgtagaagggatcgttcttgaagtcctcatcggtgaatttctggaacggagtcagtcatagtgatacagtaagataggaagatggacataccgtgccagggaggcgcataaagttaccagaaaagtcattcatcatgttcgagccctcttcgtaagagtactcctggccgttgcgatccatggttccaggaggatagaaagccacgccatccaatgggcggtgactgtttagggcatcggcaatcttgtggtgcggagtagcccggagggcctcggcattggattccttgacagcctccagcgggctggactgactgaagcggttgcgctcagggcgggtcgcgtcatacggaccctcgtggtgataggagaaattgctgacattgtccagcctgtcgatgatatcaggctgcacgatcatcgagtggcggttggacttggtggtgcggcgacgatggggagcagaggactcgcgtttgcgtctcggctccaccgggtaatgttcgggtgcgccggagtaccagatagaaggcgtcgagttcagtgactcagaacgcgaccgctgggagtagccagacggtgctggcgacatgaagcgggcatatgggttgttgctgcccatgcttgctcgcacgtttggtcgatcttgattaagttggttgaagtgatgactcgaggccatgggaatgcaatcaactgccatttcgaagttgttcgaagtgtttttatgagatgaagaggtatccaggatgaaaggcgcagggcgcaaatattacccggtgttataagtaagagtaagattactgaatttagaacaggtgaggctgaactgcaatgcaggatagcttgtatagtagctgaggatgtaatagaggaagagtgtaagagaagaagagtgaaatgtatgaagatgggtagatgtagaagggagaagagcgagcggcgcaagaagggcttatatcaaaggaagcagcggacgtgacgtgacgactcgctatacctatgctttaatgatcctcgtggctagacgcagtccaggagcctctgatggggcttagaacctcatttgaattttccgcgactgcatgtaccaattatcactgagaatagaccaccgggtggatcgagatgttaggtttactacttggccgccgattcccgggacgtcgacggagtatggcgttagtgatatcatggtatattgtcccactcaatagtttctactttcgctaaatcaattggagtggattacaattctcctattcgattcgaaaataaatcccatgattcaccatgcagaaagactaaatatatgcaaggcccatgttgcattccacatccgagacttccacgcagtcagtccacttcccgacccctatgacgatatccctggagtactacctccacatacattttcccttatttttcaacgtcatcctgccatctgaagaagaaaagtcaatttagatatcctaagtagtcgtcggatatcttatcccgaagtctccgatgactcgtccatggattaagctcatcactaggggaaatagcgtctaactggtctcacttggcatccgaactacccctggcctggtctagatctagactctatttcctccgtaccttcgttgggaaatttcttcagctatttagcttttcaccgctttttgctccttgctacgattcatgtgcatttcctcgttctacaacatacacgcatacaatctgaacggatgtcttgggatagctactcatgtgtagggacgacgcaactaattttgaaactgctagtgtgtttgatatttgtgtggtggggcgatatcgactccatttctataaatatccagctgaataatataactagagcggtgcacaaataattttcgcatgcataaaagattaggtgatatgtagctggtcttcatataaaggggctatataaggacacagagcagaggaaatgaatacaggccgatgtcgcattgccaccattccaaaggtggaattgaaataataatatcaagagtgttggtcggtgttagttacggttgtggctagtacatagaacacggacattgtagagttttatacttagaatgtcccttcgatctcatttcacagggaatactaaagcaatgttgatcctcagcatctttactaacaccggtagtgctatgtattccagccatatcgcatatcaccttctcaaaatcccccagaaaggggagggcctcgtttaacgaaagacagtcttattcaaggtgagtgcgttttcagaaaggtgacataatattctgactttggtaaagcatgtggcagactgcgtgcccttggagttggccagtctgtcctaattctaatcccacccgaggtcagtcatagcatgcgccgagaaaatgatcttgtgacctcgcttgacgtgattcgatgggcactcatgcaaacttgcgatactctgcaaagcttgaaacctctttgggcctcacaaggcttgcagtattataagaagagcagattgtggggtagtctcattgagggtagtacacctgcccaagatgtcgtttcatgcattcaggaacccgaagcgcaaactttatctcagctttatcatccatcggacgttcctagggcgtcaagtctaaatgagaatatagatccaagtgatctcgtcgtacgtggtatggttctagacggcaaggtaccgacggccaatcatttctagttttatatatggtatccgcttcatgtatcaatttaagactaaagctccttccttcaatcttactcagttactgtcttttgttgaagctctcgccacggttttgaataacatcgaatagaatttgattttgctttatctgaaaattgacttgggcatgtcatatcttatttaactacataatgtgaagcgattggctacaaaggaaatttgactctgtgcagttaaagctcttgtcttcccatgatataatacagttcgaaatcagttccatcgtttacacaaggagacttcgtctcacctacttctaaaacacgctatacccattactactactctatccttatgttaagtgttggtctgggcactagccgggaaacaaagtatgtgtcgggggggtactccgtacagtaatatgttttcgaatgctcttgatcaacaatttgtttgaaggatatacacgaaagccgcgcaaacataatcaggaataacaatcttccacttccgccgtggaattcaaggttcaaggcgacagaacctctgtgatttagtggtgaagctggtttcaatccgtcctgtgaaaggagtgagaaacaaaatgtcttcacaccacgttcagcgcatcttagaaccaaaaggacttacgtgataacctgaaaatttagggggtcggtgctaaaagaacgctggcacaagccccttgacatgtcccaaaagccgaattgcaagcaacaatagaggcaggtgcgctaatacccatagtagctccccaagtaaaacccgctgctgaatagcaagccatgacaaccgcggcacatcctgcttggcataccccgtacgcggcaggtccggcgagcaccgtagggctaaagagtaagagattaagaaattttcctcgtgagactctcatttgttcgggttcgaatcgggtttgaacggtgaaatagcgcctgaacctggggatgcaatacgaaaggaagcagatggattggtatatgtaccataccaagagaatgacatataatattttgctggcacaatggctattgaatgaagctcgattactggtgattggtctctatattgtaggcctatcataaaatttaacgtaccgctgtttccgagaaaaagataaattagttactcacaacgtagatacttatactgcatctgatacatcatatgcaaggagaattgaagactcacattcccttcttgcccgacacggactacctacttacgaataacacacccctgcccatatacgaggatttgataacatagaagtctcctgagatgatgatagtgagccgctttagtccaaaggcaatgttccaagtccactattggcgccttgatatttacagtgtattaaggtatcattaagttgctttcaagtggtagccgtttcgaacatggctgtgcagcggctcaaagctctcgctttcattttgtgaaacctgttcatgaagcgtacattggtgaatctccacgttactaaatccgtacgttgctgaatccgcacaaagatcttaggcaataattatgacataatgtgagaatagaaagaaagaatatatgacaaatgaaagagaagtgccaatatcaaaaactgaaatttatagatgaaattgaaaacggtgattggtcgcctacttgaaattgccccacatctgagaaatcagacctccatcaacacaacaactctcctgtcacatcggatgagatgtccctagtacagtattctgattcggaatccgactcagaatctagatcttctcttcgcccggccaaaaaaccttgccgcaacatcaatcaaggtccatcgctgccgcccctacctgcatcattccatagcctctatgcctcgagcacacgtgtgagtgtgcaagatgatcccagcctccatggcggccgaaaacgcataattcctcacgtagaaggaaactggccaacacatctttacctcgaatgtgagtactgagcgctggtgtaatgccacttgtacaaggagctaactttgatagggtacccggggaaagatgagctgtcgctccttgcagatgtcatctctcagtctggatatgtggcagaggaaaaggcacccgtagtgcacagtcttctccacagcgatctcggtgcccagttaccccttcatatcagcctgtctcggccagtgattcttcgcactgagcagcgtgccttgttcactgaggcgctagaaaaggctattcatgcctcgcatgttctatcgtatgtggccaacttacaattcttgatcatccgctaatactttgaatagatttcatgtccaaccagatactttatattggtcatccaattatgaaaagacacgttggtttctcgtcttgggcgtgcggagaccgagccatgatggtctgaaccgcctcctgaagatgtcaaacgagactctcgctcgcttcgggcagccgccactttatgcaacctcttcgactcaagagcaacagaccagtgcatccctccgtgataggagcagcagtcaggagcgcgaggatttctcagggtgcttccatatctcacttgcttggcgtctgtcagagcctagtccgaaggaatccgaactggtagccaagatagatttgcaaactttgcgggagatccaggttagattcgattgtgttaaagcaaagattgggaatattgtcagtagcataccattaggaaaagggataaaatgaggttctctttcagtaaattgggcgttgtctcttcaagaacatccaaattcgaaaattattacctatgcatcttgcttcagtgctccagatcctctcttaaatcatcgaaagtgagacaaagtagtcgctgcctcctatatttacatacaccttggtattggtaattacggtaatattacccacatgatcgcgtcttcccgcgacaactcccttctttctcatcaacaccaccatgcaggtcccaagtgtaactctggtaagcttctccatcatctgtgatcaaatgttttctaacctctctttcttctaggatgacctcaaagccttccaatttaagcacttccctgggcaacagctggctgtgtttccccaagaaaatgaccagaccacagacgacgatctcggatactatccagacggagtgaagcgtacgctcacagatgagcagattcggatcttcagacacagtgaagttcatgctcttctgcgagcgaggcagctccagaacgatgaggcgcaataccaagctcggatgcagtcatctatagatgatggatcaaagggtaaactagatactgtacctgaaaagcgacctctcgacacagaatctcagatgcaaggcggtgatcagaagcggctgcagtcccagaaggggtctaagcaacacaccccagaagacacgtcttctaagctggactacggggatgactctgatcaaacacaaatggcaaagccaccggtgtcacagacgccataccaaggtcgcaggattatctcctacaatgactgatctcctggttgagtatccggaagcccctatattcaatctaatggacaaacccgaatgcctacacttcccactgcactgacaagccggtaagttatccacattctattccactacacccttgcccgttcatgatgaatacatcgtatcatccttagccggaaagccataccatctgcggatgtgtgaggcattggcgaccttaatcttctctctgagggcttcttcatacctttcaatcacatgcacatatgtttatttgcgattctaacggcttatcagttatggtactttatgtgggtgcttttgacaaagagtttcacttttcgcatccgtccaaaggaccgccggccaaccatccagaacaatgctctcaacagtctcttcctatcattggatgttccgagcgatataactacaagacacattctgctggccctggggtttagatggtttgacacctgcttggtctcgacgatactatccaaaaaatgagcgactcgccatccttgtcagtcgatcaactcactggtacactgtacagctaacctccatctggaattcgggttgccgacggcgtaatcttgctatcctttgaatgcgtgaaatccttgaatatctgatcatctggcttcgggggctctctcttttggtctcgttgaagattgatttcagaaccgtcagtgtcgtcacaaaatgagcaagcttcatcatatgtgcttacagtgccttgaactagcagactgttagcagtgagcgtaacacgagccccgatcttcggcttatccgataatcaagaccgacttcaaaatgaaattttgactgagctaccatctttcatgcaaatcctacaacgtaatattcttagcagagcgtgctcgcagccatggcccatcccagggacaaaatatattgtcacaggcagcctctcatcactactcgcttctcatctccactcagacgaagttcgcaactgaaaggatctgaaaattccatgctggattcccacattcgataatcgaactgtttagagacaccgaggatcaaaaccaggtgccccgattgacccccagcagagaagacaaaccgagcctttcccttccccaaccttctaaggtgcctgcaacacatacaccctccatattttactccttcggcagtgccacctggctccgttccacctcgcaacaacagaatcaacaaagcgttcacagaatatgaaatacgaatcactatacccatagcagcaatcctctgcccgccaacaagcacagactaccacgtctgcgcaatcccaaccctgttccaagcttcagccgggtcggtatgctcccacacaagactgcggttatataacgcacattcgcgaacgcatgcttgactgaaataaacttgtaacctatgtctgcttgatcgcctgcgcgagttcagccttataactgctacagggtcagaaactaaaactatgtattattatattagttcacctctatctccaaacaccactatagtgtgtgtatgaaacaagtatccaaggcaaagccaactcaagcagcaactcgagatcgaaacaaggtatcgaaagtgtcaaaacagatgccccagatgcaaaaccagaacgccagaaaccccttcccagatacacttttatataaaccaggctaacccaacagaaaacgcatgcagctaagcattattcccacaagaaaagctctcactgctagggttatcatggagagctttgcccgagacccaaagaccaagaccgcacaacgcagcaccaacagaaataacaacgatattcaacaaagtgagggcaatcttcctcggcgacgagaaccacagacccttattcataaacaaccaaaagatcccactcaagccatacgtaaaccaactagcaaagagcgccgtgatcaagctgagcaggttactaaacacgggaatcgcagcggaaataatccacgccatggtccacagcgcaagcgcaataccgacccacgagcccgtagcgatccagtcacgcttgtgcatgcggtccgtaccctcgaaaacacgcaggtagacatacttgaacgcgacgtggccgttgatgacaccggcgatgatgatagtcggcagcgagatgccgtacgcgattttcgcgaccatcggcgaggcggagcccagtgctggcgaagtcacgtcgtcgccggcgtaccggtagattactaacgcggcggtgatgtacaggcccatgtcgatgccttgcaggagacagagggattttgtgaagtcttttgggttcctgagctcggccattaggccgaagaaggccgcgtggccgcagaaagcgaagacgatattgcagactgctgagaagccgtggtagaggtttgtgtcgacgactgcgacaactccctgtccgggtgctgtgatgccgacggcgatcatgacaattatgactgatgtcatgatgcttacgaatgctgggattgttaattgggttctcaatggggtgtatggaaacgtacaaacgatggatagccatgacatcttttccagagtgcgaggtaacgagcagatgaatgagatgaccatgccaacgatgccaaagacgatggagcaggtgccgtggtttgtgatggtgttcatggcaacggtgaaggtcaacaggtggctggccatgataaagatgaagaacacgatctgtgcagcgccgaggaattcccgtccccatttccctgctataacctcaccggcgtctgcaaacgtgcagatgtgtggatatctccatttcatctgaccgatcacatagccggtgtatgtggccattaaacctaggaagaccaagacgaggatcgctctggatatgattagcttcaattcctgcacttgaggcagaaggtatgcttacggaagtagtcccagagctgccacagcggcgggcagtgagagcacacccagtgataccgtttcagcaaccatcactaatagaatgttagattagggttggtttgatatagcatattatcacatacgcagaccacattgcctaacaagatatacgttaataacagagctaccacttcgagctatgaaacataccaccacctgagtactttgtacttgacctccgcgaactcctcgtcgccaaaggcatcttgtctgactttcgggacctcaaacttctccggatcagacatcaagtccgcgggatttatatagggactcttctcattggaatcgaaatccaatgcagaatgcgaggggctcatagcgcagatatcaaaactagcgagtataccagtatacccgggaagtagatatcacgtcaggaaccgaacaaaaagcgacgaacaaaaccgaatcgcttgatacaccaaatccaaagagagagtaagatcttaacgaaagggaaatggtattaaaaactcgaattcacaggaaaagcacccgccaagtcagtaaattgaacaataaagaatccgccacacgaaactgatgtggatcgccgacctgcggaccgcgacgacgaatcacctcgtcgagacgtaatggaaaagccgaaaaggacttggtctgctggattcgagtgagaaattacactggtgaaaattggaggaaagaaaacttcgctccgatgccggcctcctgtgcgaggttggacctggctgttctacaggagttcaggtctgcgagggtgaaaatttctataggaggtctaaattagaggcgactacttttggccctgcagatttgggaactccatctgataagcttatttatgtctgtctacggggtagcctatagggatgaacttgcacgatgtcgtgctcacgccttttgccttaaattgcacgacgcgttcggatatagatcgggtcggagttggtcgctagttccggtttcttttgatgaaccacacgatcttataaggatatatgggtcaactattcttgttttcattgaatacagctatgctttcatgggtttctcatataagctcgcatctgtcttcttcatcaggttcaactctgtcgacacatcctattaacagaaagttgatctcaacgcatatcccaaggccgctttgaaattccgatgcgagggctttgtatgagcccgacgtaacggcgacatcacacaagagaacccctagcatgtaatactggacgtagatagataaaaggtaggccgaccgcccaggatgccttcatggttgcaatctaccatgtagtcaattttgcccatgccgtttcagttcaaccagtagtgcttctcttcaggtggcatatatagcagcctcacaagaccccagcagatgaataaagccactttcaacggctttattttctcttcgagcttcggacggctccgtctgaaaagagcctccacagggagacgcttgcgtgttctttatcgatgtcgttaattgctacctccaaggcacaggaaacagcaaatagttgtaggtgctcaccctgtgggatgaaggtagaccgactcgccagctgtggggtgttttcgcttgcgactgggcttgcgactgggcttgcttttgacctggacatggtgctgggagagtcgtctttagtcaaactcctgtgcgcaggattgaataggacttgtcatgaagattctccggtggttgaatatcatattcacctcattagatttcctagttaaaagtaaggggaaggatgattagctgtgattcggaagttatgacttcgctagattcaccattgttgtctgctgagatatctgatgtagaatctggtttagatttttagattcgatcatataggctctgcgattcaccttggttgctagcgcaatgctcgtattcactctctgagtctggcgagatgcgcacatcacagcgtggtatagtgaggaagaagcgagatataagaactgtgatatataaggaagatagatataggagagcagatatagggaagacagatataaggaaagttaagagatagacgatccagggagaaggcatctggctatataccgagaagttgtttgtcaaagacaacaaacacatgtggcatttgttcagggaaggtgcaatggagagtgtcgcgctttaggaaggcacatgggttcggggtataaaaggagccctccccccatttctcctcttctctttttcttctcctctccccatccctttgaccaccatctcaccgtagccccccgagacagcgcaggcagagggtctcgtagcacatgctgcttcacctaccacagggaccatgacattaccatatgcatgaggtccttgtaggtctgcatcaaacaacaaactggtctttctcgtggacgttcctgaagtcgtggctctcattgccatttgacgagtcctacggaatacatgaggggtgtaaatcttcgtagccggttctctttgtcaactggctatgtatcaatatcaggaaagcaactgacttcttgttcttctttcattcaatcttactcacattcatttgcacaagccacttatacggcaatcattcaagtcccgctatggcacctgacatctcgaactcctgcctcgctgagcttgctgtccagaatttcctagaaagaagctacccaacacactgaagagtcaggatcacctcctgcctgagatctcaaagacggctacaccaagtcatgtctcctcatcggactacgcaatcaattcttcatctccttctatgctgagcatggacgaatgttcatcaaacccatttacacacactggtaacaccgattccagataacatatccatccaattgtcaagattgaccatgaattaactaatgcacctgtacataaatgaaatatggaccttatgtagttagccaaacctatccaggaatgaatcccatccatccatccaccaccaacgccggcggactttccagtccggaaatgacaagcaaaacgaaaaacaccatgctagtaaaaatgctatacaacaaaaaatgtacaaaaagaaaaccatatgtttcatgcaccatgtcaccccaaactccgccgtttaagtctccgcctcttccgctgcgactgctgaatagaatcctcgttcaggatatccggcggcagctcgaagtcctgttcgcccaggtcagggaccggatatccgaatgcgagggttgagcgggatccgccgcggcgtgtgccttttgttgcggcgatggctgcttcgcgcacatgtcgttggcggaagaaggatgtgaatgggctgtcttgtggagctgggttccagaagtgggagagggagggttgttggagccgtatggatttttgggttgagataggagctgggtgaggtttagtgggtgttgggttgggctttttgcgtttggggctggggtttggttcggagttgttggtgttggtgttggtgctgggaggaggtttggtgatagacttgcgagtagcgggcgctgtcttgcgccgtttagctgcgctcgctgagcgagcttcttggtgaagctgacgcgcagccaaagcgtcgacatcgcttgggtctgggtctggctctgcgtctgcgtccggcgtgccggtccccggggccggtgagctgtccacgggacgagatcgtttgcgcgagtgctgttgcgaggtattgggtgttgcctcggtgcctggcaccgggagtgccttttccctttccagtttgcgacggcgctcttcgtctttccatgcttggaacttgttgaccagagtgactagctcctggattaggatatcgcgcttcggctcgtagagcttcttgtcgctttcgtggactcccgtcaggcccatcatgcgtagccagtcctggccgcgtagctcgtccaggagacgctctaggacttgctgttcatgttgggcgcggttgcgctcgatgttgcggagttgtttctcttgtcgttcgaacttgcggtgtgcgcggaaataggtctcttcgctcagcgggtcgactgcgggtgtgcctgatgcgggtttgggatgtttggggcggatcttttcacagtcgtagagcttgagtagcgggttgccaaagggtgtaggctccgggttagagcagaatggtagtggtcgcgggaggtcgtccacgagagtgatagttgttttggcagcaaggaattctatagtaaccaatatcagccatgcgctcgatccattcaggtcgagcaacttaccaggttcgggcacatccaagctgataatctgttcgtagttgtggaaatactgcgcaagctcgctcttgcaccgtgacccggtattggtcgaacgcaacgaccgtctctccgaccgtgtatccgatgcaggctcgccgtcgctcctgtcccgcgtcgggggcacccccacagcaccctctgccttgatcgcgctctcgtcgacgtcatccagcgatcgattgtcattccgatgagtcgtgcgagcaggcgaaaccgttggcttgctattcgcgtccccaatcgcaggggtcagggtgcgctgcttcgcgaccgacggggctggcgagatcgtgtccaatgggtctggcgactcgtgcacgccgcgcaaaaaatcggcgccggaggaggttccctgatcgcggcgggcgcgtggggtcctgtaaatgccattgccattgccattcccatttgcacatgccggggtcgccaattgcccggaggcgaccgtgtccaccgacagagaggagttgcgacgagtccgattggaggtgcgcgggcgcgagggtttcaaggggttggaacggggtcttgcgatgggatctttgatgtcgagacagtcgggggagctcttacggtcggagccatttgggatgcgcgatttcttcagaccgtcggcaggatcgggggcccgtcgcacagagcggagggaagaccgcgacaggagggccattttggatgatgatcagttcatttgcattcagggggagtcccccgagggtttacagggatttagggatgaaatatgggcatgcgagaagttcttggcgaatgccgatggaggttgtcaaggtggtttatatggacttcttggaggcgtcaacgatatattgattctgattctcttcagagatagacaatgcattgtattcattctattgttctattcagaattaattaattcagctgttgagatatatagaatggcgcttccaatgggcacctacataggtaacactccattcttgctacaggtattatcctgagataggttctcattgttaattatctctatgttcaatgcaaaatagtcaactattcaactattcaactctcgctatcccaactatctcggaaaagggcaaacccccacgggccctcagtgtgggggacggcaattcaaccattgccaggtcggaattgtaatatttctatacatgaggggtgagaggggatattgggatattggatataagtctagtaatagacagtagcactgggcagtagacacttacaggagtagattcaggatatcagatagacaacctagatatccccagtttacccctaagaggagaggggatatactctcctatacactccaacgcatcatcgacggaaatcaaccccgcaggcgtggggggaaatgtccgaatgaaaccaaaagcagacgtgggggataagactatccagctaaatagctgtaggttcgccgatattgatccccatccctaagtgacatttggtatgcagcgaatgagtccatgaaacctacacgtcctgacagaccaatagacgacctcttctccaaaatgaccgccaccaagctaaatgccctcccccacggtgtctacgtccccaccgtagcattcttcaagcccgacgaagaagtcgacctcgcaacggtcgagaagcacgccgtctatctcgcccgcagcggggtaaccggcctagtaacccaaggcagcaatggcgaagccatccatctagaccgtgaagagcgcaaggccatcacagccgccactcgcggcgccctcaacgcagccggctacagcagcatgccagtgatcgccggcgccggcgccgcctcaacccgcgaaaccatccgcttatgccaggactccggtgcagcaggcgccgacgcggtcctggtcctcccacccagctactacaagacactcgtgagcaccgagtccatgcacgcgcacttccgcgccgtggccgatgcctcgccggtccctgtgctcatctacaacttccccgccgtgcagtccggcctcgatctcagctccgacgatatcctgacgctcgcagaacaccccaacatcatcgggtgcaagttcacgtgcggcaacacgggcaagctggctcgtgttgcggcggccaagcctgatttcttgacttttggtggctcggccgatttcacgctgcagacgctgattgccggtggggcggggattattggtggcattgctaatctgattcctcgctcgtgtgtgcgtgtgatggagttgtattgtgctgggaaggttcaggaggcgcagaaggtgcaggcggttgttgcgcgtgccgactggactgctatccaagggggctttatcgcggttaagactggtctgcaatgttaccgtgggtatggtggtcttcctcgacgaccttgtgtcgtgcctgatgcgaaggctgtggcggccattcaggaggagttccgggaagccatggagttggagaagtcgttggagacagtatagatgaattaaatcatgataccagatgctatacggatattctgttctttccagttagttcaagataatcgtaaataaacacagtgcgactgtatcatccatagctcctccccctcttttaatatcagatgaagttgcatgtgaaggttgcactgtctcctcttctttgcttctaatcatctccgtttgatgtaacaggagataactgtttgtttttccgatctcgatctccaggttgcatcaagaatgccaatgtgagatcggcaatgcagcacataaataggtctggctacctcatagccacggtctttctgtttatcatcatcactcgactcctcatcatgaagttcgcctctgtcctgactgtgctcggggccttgtcggtttccgccgtccaggtgaatccacttcccgccccccgtaacatcacctggggttcctccggtccaatccaagtcaaccacttgaatttgaacgcccatcactcctctgtggtctctcaagcttgggagcgagcatgggagactatcaccaccctgcaatgggtccccgccgctgtcgaggccccgattccctcctacccagccttcccttcgacccctgtctccaaggccaaacgcgcgccctccgcggtccacaacgtcaatgtccatgtggtggacagcgatgccgatctccaacacggcgtggatgaatcctatacactggtggtggccaagggcggcatccagatcaatgcgcagacggtatggggtgtgttgcacgcgttcaccaccctgcagcaaattgtcatctcagatggcaagggcggcttgatcattgaacagccggtcgagatcaaggatgccccgctgtacccctaccgtggcatcatggtagacaccggtcgcaacttcatcaccgttcgcaagatcttcgagcagatcgacggtatggccctgtccaagcttaatgtccttcactggcacttggacgatgcgcagtcatggcccatgcagatgagctcctaccccgagatgaccaaagatgcctactcgactcgcgaaatctacaccgagaaagacatccgccgcgtgattgcctacgcccgcgcccgaggtgtccgtgtcatccccgaggtcgacatgcccggccactctgcttcaggctggcagcaggtcgacccggagatcgtggcgtgtgccaacagctggtggtcgaatgatgtgtgggcggagcacacggcggtcgagccgaaccctggccagctcgatatcatctatcccaagacctacgaagtggtcaagaatgtgtaccacgaattgtcgcgtatcttcgacgacaacttcttccacgttggtgctgatgagatccagcctaactgctacaacttcagcactcacatcaccaagtggtttgccgaggatccttcgcgcacctacagggaccttacccagtactgggtcgaccactccatgcctatcttccgtagtgtcggtgagcaccgtcgcctcatgatgtgggaggacattttcctcgcgaccgagagcgcgcacaacgtgtccaaagacatcgtcatgcagacttggaacaacggcattgacaatatcaagaagctcacctcggccggctacgacgtggtcgtctcgtcctccgatttcctctacctcgactgcggccacggcggcgctatcaccaacgacccccgctacaacgagcagagcaacactgacggcggcgtgaccttcaactacggcggcgccggtggctcctggtgcgccccctataagacctggcagcgtatctacgactacgatttcctcacgaacctcactgccaccgaagcgaagcacgttatcggtgccgaggctcctttgtggtcggagcaaatcgacgatgtgaccatctccagcgggttctggcctcgcgccgctgctcttggtgagctcgtctggtctggtaatcgtgacgcagcgggcaaaaagcgcaccaccaaccttacccagcgtctgctgaacttccgtgaatacctggttgccaacggtgtgatggctactgctcttgtgccgaagtattgtctgcagcaccctcatgcttgcgacttttataagaaccagactataatctcttaattgctttgagttggacttagcgaacttatactgtctggtctgtatatacttggtcttctatacccaataccattggaattcttcatacagtctactatttgatatgtagttattgtaacaaccaacccacaacaccaacagctcctatacctacctcctacccaatcccaaccccaatcaggcaccaaagcctcctccagcccaaatcaaattctacccccaaccccaattctcctccatattcaccttaacccaaacaaagccaacctaaaacaaaacaaccaaaacatcacaaggccatccaccgatcagaccctcacagaaccccacagaccctctccccttcccaacccacccaactaacctccacaccaaaccaagtcaaaaccgccgtacaacctccctcttggaacttggaactcacccttcgcccccgtcccggactagatggcctcgggaggggcttgctggtgcagtatgcgtgtaggatggagtactctgtaggtataagttaggtgcaagcatgttgcatgcagtcggatatcgcatgatatcattagcattgctatgtattgatcattctacatccacatattgtatatagtatgaatctacataaatgtacacataggtacaagttcgacgtcaatgttatatacatctgtattcatacatctttccatgtatacgatccataccgcaccggaaaaaaccatccatccaagcataccataccatccatgctcaatccaaactcgaaacccagtctacggattcgattcagactgggctgggctgcgcgggggttgctcacgtgtgcacgtatatgcagatgcagaaaggaacatatgttgcacggggatttagctgggaatgacaaattgacggattggggagatataggcgagcggttggatggttattgcttgctggttggggttcgtcatacacgtggaatttggggttatttgtcatttctgggacgggggtaggaggtttgggatggatgaatggtaatgatgctgataccttcctatttgggaatgggatttgcattcttcttaccctgtatgtatctatgtatgacccggagatattcggtacatgtacatccctggcctctacgtatgtgtttatataagtatgtaccgatgcttccatttccggttcgctgtgcccgagtagatcgggaactgatctcgcatattctagttacgtgacgttgcgaaataagagtaactggttggtaagtataactcctgcttggtttggtttacggcttacgtcttacctggcgtggattgaggtgagatatatttctgtatcacagtcgtgtttcaacgtggatcggggtcttttcttcttatattcccttggcttatgtttcatgcgattgtgcggcttcgaataatgcatgtctagcatatcatatggcgttaatgactggggcgttgatggggctaggtttgaggttactcttgcaacatatatcaaaccgaatggtcgaaaatatacatcgacgtaacaaaaaacaggaattcattcgttggccatcaaatttctaaatttctaatacgtcttaatcttactctgactcctatctcatctcacctcgttaccgtttcacagcataaccccaagaaccatagtctgatcgcagcgtggaccacgaccaaatagaaggtctcgtgttgagcgataaacctggaactgtctttctgacagggctgcggagaatttgcggcattttgcatcgacagggtcatccctggtctgctggatgtgtttcattatatcccggtcggttctgacgtgcgtatgtatgtattactggtaaggcttgcaggggctgtgtcgacatttgcatggaagtccttctagaaatcgactttgttgttggacgtacatgtgttcggcatgtctatatgagtttcggcgaatgatatctcgcgattccgaatctggatatgtcaggcatgtttgagatccaaattggaagtctgtgccgaagagaatggagactatccatattgcgtactaatgccgttaatcctcaatatccgacttaggatgagttcaagaatatgggcaatccctgtaggttgcgaggtatacatcgcataaaaccacataagcagcggaccgagctcagaccgatgatcccccacacatcccacgctttacactccagtatgtactccgtagatgtgcctgcgatgtacgccacatgtcaatcccagggttatcataggagtacctgaccgcgtcaatatatctatccaatctctcgggcaaagtaaagcaccccgcagcacgccatcacccgatacatctacatctgccgagctatctgatcaccgaactatagaacctaatcccaaccgaaaacctgatcgacagcacacgatgcaggatatacacccgggtagtaggtccgaccttaccagatcgaccacttaggagttcgtcctaccacacccactccctcgcgtgtcccatcccgcgcgggctctgatcaatggaacccgggttcctatctatcgcgccttgtttttgtaattctttttttggccgggcatgcagacgacccacacgcggggatgcgaataggaaaagactgattccttttcctgtcagttacgtcggggcgcgtgacttccggatcggataaattaattgtggatgcgggtcgcatccatatgccgtgttacccagacgtcattgtagcaccgcctcactgagtggagttggggatctttgcgtcattttcggggagaggaaacacgctcccccataggctgaggagtgtggctggtgtgtggatggtgagtggctggtgatatggggtgggtgtggcttgcgtttcgcttctttcggcttgtttttgtttttcttttctgtggcgcagttgcgagtcccttggtacggtaaatacgtgtaaacagaggtaaagccacaataggcaaaagaaaaatactgtgtagtggagatccgatccacatagttgtcgctagtgaattttcaatctaaatcgcagttcgcttcgctttttgctcgggatcggcacgccaagtcagatccaaggtgacagagcaaaatgggtggaggtgtgatatcaatatcgtcaatcgggatttggcacggaattgatctctagttcccgagatcccgtgcaggtcgatcatcagtgtaggaatatgtatcaggatgatttcatgatgcatgcgccgaccgtatacagcacgagcctctttcctattcggtcgtgtcaaatttgacaggacttgattagcgtactgtggcttgactagtcctttcgcgcctcgctttcatctacaatatattgtctatcacccgcgatgcccgggcggaagagtggctccaggtacagaaatgaacagcgcatgtccgtcatgcaggaagatcaccgcgggaccccccagtaattgaagacactatcaatctatctcgacttgctacacttcccaaatgcatctgcctcggctacagtggcacagtgtaactccttgctcgagtttatcacggggctgagtccacatttcccgctttggtcggctgtgacacacccagatatcagatcagatgatgcgatccagctccaatctaaagaaccaccccatattgagtccgtgggcagatcatccagtccatggaaattcaaaccgaggggcgtggcagatatcgtatgaccgagaagtgattggactaccgcgtacgatgcacatacaacgcaactgcaagataacaaagggccagattatttgatctacgctatcaaatactggaaactagttcccaggccctgaatcagggccggtgagtagctgactctagattctactgggattaatagcttcccctctctgaaagttaatcttgcattgctcgtgtcggagtggcaaacggggtgattgggtgagttttacccctctcgggtgaacaccccagaaacagaatccatgaacacgtagatcagagcccgggtgaactactgatctggcatttggagacgagcaatgaatcaggataaggtatgtaggacgaatgacttcaatgtaagagcaagagcaagagctagagccgcacttttccgtatggaactgataaatcaagaattcacgcggaactcacgcgagcagttactgagattaaggacacccctgtcctactcgcatttaaccttatttagcaatatgccaagcatcctaattagggacatatacctagtacactctaggtaaactaccgacggtacctaggtaagtgtatttgcatttaccctttacatacttcctaaatgaatgatatagtcccacatggactgatctgtcccaaccacatggaaccgtggagaggatcggaccgcgttcatggtactgcagcttacctttccttgcctatgaatgaaccaatagaatactttcgctatggtgtcccacggtggtaagacaggcaaggatatccccttcaagaaataagatatgtgcaaactgtatcacagagtagtttcattcttatgcaggggctcgcttatgaaccttgtcgccctattttgcaggtgcataggtagattatcacataggaaaagagatcaggaccagttaccgtttacatgcacgaggttggcataatgatatatcatcttttcactcccaatgtcttgatagagatgatctactgacaccaacatgtatccgtcccaatggggagcgtggacacgctccacccaccctccgatccacgtccacctgcattacataggcgagtccagtcagatcgcaggaagtagctgccgggcagttcactcgtgcatcctagtgcctatacgaggcttggaggcttggggcggccccgctttcctatttgacgagatgaccggacaacgcacaacgcacaacgcaggatagtgtcaggggaaatggggctcctcgtgcgctggcctccactctgatatctccacttagcttaaggacaagctggggtgatgttggtgctagtatgatagtgattccggcgcggggaggttagttttgatgaggctgtatttcaggcacgggaagacgagcatgtggatatgacagatctgaagcagtcgttgggtcgaaggattctgaaggagcgtgtataggtctagatcttgggatcgtcggcgtcgctgttggaagctgcatttactattacattgttatgcttggaagtactggatctaggcccgacgaaggatcacaggagtagattgaatttgaaaattgggaaatcaatggcattgttgtgtattgttttgatcgggtagggtacggtcgaggctattctgttgtgtaacttagaagctttctgctattatagaagccttattatgtagacagggcttaccctgtatataataagtgtgctaatttcgtcgcgcgcggttgagagacacaaatatcgcttcttgaaacggctaagtcccggccgaatgagctatccgactcgattgatattatgttaaagttggtaattggaattggaaatgtcaagcgtgcattggacggtcggtaggaattgctgtctttggccgtataacagcgctaaatgacagatggggctggttgtacgggcgtcggaagaagatacagaaataagctacgaagcgcttattataaccccaaaggagtcagtaatatttggggtctgaaatatccacaatatagcattataatcaattgaggaaggaggataggaataagcgtggatgtggtatggcaagttcagagttcgtacgactcggcggactaaaggaaccatgaaccatgaaccatgtcgaccagtttcccaactctagagatagatgtaaccatctggatctttagtctagtctagtccttatccctacaccagactgggttgtcgatgcatacaatattgtcgacgttgatcttctccccctccggctgtttcacttctgtttttagaaacaccacgcgcttgacagggattaaacgttcccccaccccatgtgctcggtcctcctatagggtttagggccatacaactccgaatagcataagaggctcaatgttgggatcggcggttgttttcagcgtacagcgtaaaatatagatgaggattttcggtttttgtttttactacgtgtgggatgtctcgcatcgaagttggtttattcgcggactttattttatttcggtaataccgcaaaactggaggaatacgaaggtctggggatggaatttgccactctggagaccgtcgctggccccagggtgatccgagcacgaatgacatcaaagtaaatattgtcgttcgaagtataatataacgttatagacgaaagttgaaagttccatggttctatctgagtcaaccgtggacagacagtactcggactagattgtcttgttttgatatttccaagttggcaccgatttcccgtattgggtatctctttccgacattttgggaggaccgcgttaaggctaggctaactaagagcctcttgatcgtcgtatttttaatctggatatgcaagtccataggaagtctcggggtcgccggatcggcctcccttcggcatataaattatctcagtaactagttggggccaataatataccattaataatctctacgcagtcggatctctggcccgacgccgggatgacagatgagtggagaatcattctatcctcaaacgatagaagagcctagaatgtcagattcaaatgcttgagttacgtttcagcgtttcagtgaaatggaaatatccaccatgttgggggccaaaagtgtgagagcgagagcgagttcagggccattgggtccagtagatacctcgatctcacgcatgaaggagcgataatctcagtcaatgggtacttcttggtactgactggctaatgcgcctgaggacgttttaggtatatgtttgacatggacgttgaaatcagtctaacagttatagttacatactatgcatatgatatatctttgaataacaatcaaagaattatggctaatagtaagcgtctgcacctaacccattgcccgggtatgtacatgtgtcaagtgcaaggcaaatgcacgtatgttatgttgtatgccgaccgcagtgtaggctaagcaaggcaaagaatcggtcaaatcaacacaggccagatatgacttcattactccagtctcgcatcaaaatttagactgtgcatatgactaagggtggataggatagccccattaaaaaaggggatgttaccaccgggatcgccgataaatacaacatacgaactccccgccagcgctgtaatttatccagctgcgcctcaattcagggatgtggatcgactgccccatgttgtttggctacggacgaatcgcatgaacgccttcgctcgcttatgattgggactcactcacgccggtctgttgtggcttgggcatatgtggcgctagttggctttagtgcatcggcccctaacacggacactccgagtgacagctcgcactgttatcccttgggctagctagggctatggcgtaattagtgtagatgatctggatctagatgatctaagatgctgtcatcggaaatgcggagagtagggccgagattgggttccttcgtcttgtatatcaccatggtggtgttcggtatataataaacccagggatcttgatggattgagggattggatcgtacagattaacctgcatccgaatctcggactgaaaaatgggaaatgtcactatatcaccgtgcatccgagaaaatattaattgaggttctttccattttgggtagacccaccattgggttcttcggatatgcaacctggtgatcagatcatcaaggggtgtacagatcatctatacatataaacccatgccgtcgacagattgacactacagtactcaaggaggtgacacctagttagttacttcctccaggttaatgacgtaaaaggcaaccaggggaccttggaagcaggccacatcgcgatcaccaaagaatgcggctcttgaacggcagcctcggaaatcagaggacaacacacactgtaggatcgcctttcgtgattaccgagaaggactagtgggcgggactgatacgaactcacccgacgctaaggaagcccaccgagccctcggagagcctttcagatgtctgattggagagaatttagcaagccctcattttcctgttcgttgggttggcacatatggaccaatcacccttccgggcacgcggtcggcctgccaagttatggaggagatggggccccgtcacggatcgaccgaacttatgggatccgattgtatttgtacaagtatgtgtacaacataactatgtgttcttctaacatgccttatattccccttccttctcatagaaaaggagaaggcaccagatctgagtctattgcattgtctgcttatcttagtttatctgaaaagaattccgtccgctctttctctgggtcagattttggtgcaaaagagtggaacgggtacggagtctgactctgactgccgagatacgaagtatggagtagaggatagacagatgtagatccactgatccattgcatggaagctaggtcaaaagtagtctaggcctatatacaatgtcgaagagaggttaaaaatgtatttttggggaaaaggggccatggcgccaagcctcggggcagctctactttgcagaacggagatgccgatgacgacagggtaaacgattaatcatataggtaacatttgagtatataggtggctcctagaacccgaggtggctcttggtgcaacggtcaactttctgacaggagcttctcctatcgtcaaaagtataatttgaagaggactactccgtcgcagctgtgctcgatgcgccatcgatcggtttccacgaacccgatggacgatcgcctcggtgaaagtacttttgaaaaactaatattccggagataattatggagataattccgggataaatactccgtattcggggatatattcggggatcatatgtaccccgtagggcagagtgaggcaagagtggataaagccagacgagctgtcagaacccagaaggtactaaccatgcggagacagtgggttatattgactgttgacagcatagacatgcctgacgaaggctgagcttatggcgtagatatatgggtaccgtgcagctgtacggagtagaaaatagagtgtacacaagcagaaggtaagagcacatgactagttaattaacagcgattactcatccgattaagcctaataacccgaaggaggggccctaagtttccctgtctgttcacagccacgttcaaccggttcgtgccagagatacagtatgtaatggtatgtaatggttactggattattatttatttatttgatatttgctttttactatgtgaagtgttttttatgattttcatttcatttcattttttatttcaattccattttccttttattttcactttttaaataaaatataattatagacaagactataactaactactgtagggcgggcccatcgtcaccatttaacaatctcctcgacatctataatatcctcttctcccctccggtacgaatttaaatcattgactcaatccagcgcatccctcgaccacttccgggtacgcttgtttaaccttcttcgcctcctttgtcgatcttgcctcgctacccgcgtctgtggagttgcaacttgctgtgacctccctgccttgcgatatcataatcgacctccttacctccgtgcataagaatccgattctctctgtcaattgcgcacgttgcctcttcgtggctggcgtgtttggttagccgagcgggccgcgatcttacccaggaaccttatcaccggtatgtccatgcgtcgcaacggaaaatcttgagacagcatgtactgaccagctggctatgttaggatcgccctcgcgcattgcattctcaatcaaggagatgaccacttttgaatccaaccctgatttcaccctctttcccttccacgcccgatccaagatgatggctgtcgaagctgcccggccgaaacagctatacttcgatcccatgatggatccttccatgttctcctttcccctggagagtctccccaactacgcacacggccacggccacgatatgcccagtgcttccaattcctactacgatacccaccctctgctggagtctgcagatctgcacaatcctacatatttctcttctgtaccagccacaccgccttcggtctccgcgtctcactccgcagagccatatatttccaccgggtctgcctccgggcagtccattgcgagcgcatcttcttcggcgatgggatcgccatactcgggaacggcgcaggtatttcaggagaattgggtgaatacgaaccacggattgggtctaccagccgcagtcatggacgaccttttctcgcaggaatacatgggaagtatgttggacatggatatgccctatcaagaaaaattcccggacccttttgtcggtacgtgttgatatcaatcgcaaaccgtctggtgtactaacaatgcattcagatccctcattgatacaaccgacgcaacaagggcctggaattaccccgactatctcataccccgaccaacccacctcttcctactcaaacgtgcaaccgaactacatctcccactctcccgcaccttcacctctctcatataatgatctcgcagagcaccactcacccgcaatgcagcacaatgggctatctcccctcatggtcccgcacaggtcgcattcacgaccgctctctatctatgaccgacggtcgtctatttcctcgattcattcccgacgctcgcaacacagcccggcgctgagcagcatcgaaccggacgaagaaattaaggagaaagggcgctgcccacaccccgactgtggtcgcgtcttcaaagatctgaaagcccatatgttgacgcaccagtcagagcgacccgagaagtgcccgattatgaactgcgagtaccacatcaagggtttcgcgcgcaagtacgacaaaaaccgccacaccctgacccactacaaaggaacaatggtatgcggcttctgcccgggatccggctcccccgcggagaagagcttcaaccgcgcggacgtcttcaagcgccacctgacctccgtccacggcgtggaacagaccccgccgaactgccggaagcgcagccccggactaaagaagggcaccaactatagccccgacgcgacaggaaaatgttcaacctgctcagcgaccttcagcaacgcgcaggacttctacgagcatctggacgactgtgtcctccgcgtcgtacaacaagaagagccctccgaggcgatcaaccagcagcgcctcgcagaggtcgcgtcagacgaggaggtgaagaagaccatggagaagcaccaactcctcgacgtgcccggcccggtcgagcaattcgacgattacgaagaccaagaagacgacgatacccaagatcccgccagctggcgcggcctcaagacgaaacccagatcctcgaagagcaacatcccggcctcgcgcccgattatcggctccggaaatgcagtctccaagaatgtctccaagcccgcccgcgctgtcgtaacccgccgtcgcaacaaccgcggcaactacccccagtcctggggctgtcccagcagcaccatgaagacgaagaagcgcgtgctgtgtgtttttgatggccagcgccgtctgtggaaagacgagatgatgctcaataacgagttcgaggtccgtctgagactgctcggcggtgcgggcgatggcaccaaccgggatgcctacgttaccgatctggacgtcgagacgatgaagcgcgctgagggtgtgctcagtgccacagaggaggagcgtggtccttggttgaacggtccttcgccttacattatgggccagccggcgatgctattgccggaactgtctcatgatgacgagctttcgctcaatgaattaatggcttaaacgactttcttttgtcttttctcctactccttactctctaccttttgagacctttcgtgtatttctttcatgtctcatgtttccgtacagcagtggcgtcttgacgagcgatttgtctgattacggattatggatgataccttgggactgacacttaatgactttcgttctttgttttctgtttctgtttctgtccaggctggtctcgtggcttcatgcctgatcccgctggcgggattcgtaccaagacactattaattggggactaggaatgagtgtctgaattgaaaacaaaaaacattccatcttcaaatgtcttgaattctcagcaagtgtaggtctgaagtagaaaagatataagaatgccatagacccccacctaccgatcttcacccccatgttctgccatcttccccggtgtttaccccatccaacctccacgatgcaattgggactctcagaacatctgtccactctggtcgcaagacgttttacagctgcccgagatagcggccatctcgtcttctcctcaacccatctgtccatcatcaatgccgcaggaatatcagtgagtgacgctaagacccgaccacgacggttctaacctgcatccagtaccaactccgctactgcccggccctcgcaaagaaaccctccaatctcaaggacaatggcccgaaaacgccaaagttcgatccctttcagaacccatgtccggagcttctgatcgcccagttcccgcccgagaaccccgcctacaacctcatcatcaacaaattccccgtcatcccgaaccacttcctcctcgtgacaaaagactggcaggcgcagacggacatcctcgacaaggctgacctagaggctacatacgaggttctgaaagcctggaacaccgacagcgatggctccaactccaacagctcgaagagcctcttcgccttcttcaactccggcgacgacagcggcgcaagccaagcccaccgccacctccaattcctccccgtcgaagcaatgcgccagccaggctcggactcctggtccccactgatcgacctcctcacgcaacaaaccccccaaccaacctccccctcccaaacaccaacacccaacttccagcacctccccggcctccccatcgcgcacttcgccctcccaatcccaccaaacccctccgccgaaatcctgcacgacatatacataaccctctaccgggccgccgcggcagcgacgcgcggacgaacaccgagccaggacaccgagtcgctgcccacacacggacgagcgtgcataagctacaacctggccatgacgcgctcgacgatgatgatctgtccgcgcagacaggagacggcgactgtccccgtcgacgctgacagtgtcgctgcgcgcgagatcgcggaccacggcgtgctctcgctgaatggcactatcctggctgcgacgctgatggttaaggccgagggcgagtgggatgctttgcgggagaatccggagcatctgacgcaggtgcttgctacgattgggtatccgcagacggattctcggggttcgtcgctttgagggtttgctgggagtatatagctacgatgggtagactacttgcatgctagaattgaatacccaatggaattgctgatttatagcttgaattgatgcttgtgtttctcctatctatgagagattgaaataattatgtcatgattgcttaatagaagatacttttctatatgctgtatctacttggagcgaggttgagggaagaacctatatgtagcagaacaagatagagaaaggcctatcagaacgtgctgggaagcaacaatgttagccataggaatgacaggccctcctaaggtgtttcttctatctgtttatcaacagacttggaagaccaacacagggagccaacacggaaattaaaacaaggccaataccaaagccaccgtaattcagagacatgtttcctttattcggatgtatctagaaagaaggaaagggaccattagacatgcagtgcagagccatgtgccagactcatgtaggaaaaagcgaacggtgagattcattttctcagttctcgctttatgagtggatggcatgaactgcagatgagattgtttacaagccacgagccatgatgtgaaacaagggcagaagccgggcgcataagcagaagctaagaagacaaacccttgcctatataggaagctgggaatgtcacacgtaatagcggaagccacagttacctgtcaactgatcgtagaagaattcgagttcgaagagtgagcggatgttgctacaaataagcctgatagccaagctttcaggcgatatagctttctccacagtcttttcgggatacatccgattgaaaaggtcatcataccgatgtaaatcataggcatagaacaacattgcgccttatcgggaagctcgggatgtcactcatattctgcagcctaatggccactgaggctcgagctattaggttgctagcgtgcatcgtgcgaggaggcgtcgatttcattggctgtcttgttcatcctggcgtaaacgtgctggatgggatggttaagatgcttctgtggtcaaaagaagacctggcaaagaagagagtaagtcttgtacatgtctttccgtggaaggcagtgctcgtgctagaagccagcggtgagtcgctatcacttgcagcgacggcgatggtatgtgacgaccacaacttcgacaatcggtccgggatctagtcaaagaagctatagtcactaggcctaattgagatcccgtactttcacatgataaatctgcatggtgggttgatattagcggccatatttctatgtttacttctttctagtcattatctaactacagttgagtattctggtggtaatccattcccaatcagacttcacaagaaaccaaacacttgcccagacacaaagcgaaccacttgcctgccaagttgcatggcaccaatagaccggatgactccaaggaagctcactacgagctaaccagggggctgtgaccgggcgcaaagcatgtgatctgtataaatccgtcttgattggccaaacttggctctaatttccgttggcctcctttattggcagcctggacgcttttgcacgcttttgctaggccgtttatggtgttatagcctcacattgcccttgatctgcccgtgttctcgtataggattggaccccacacttgactccatcgacatttaagaagacgccttgcgctcgttgatcagattcttcctttaccatcgaactacggacggaatattcaccatggaaaacaacaaagaatcaacagtggctattacaccggttgctgccgtcgaaccaacaccaacaccaacgccagatactacagtcgaaccaaccgcaactacaacaagatcattgccggtagccgacccaatggcgatcatacccgcgcagagtggacctcccccacaatacgatgagtatgcatctcggtctaagaaaacatcccaagctaacaaaaccagacaccagaaagacgcaatcacagcacctgcaccggcagcgacattaccacaaaccaacgagaaagccgtcccaaccggcctacaagttccagtcgcccacagcgttatcccactagcccaagttggtgaaaagcccgcatggatctgttgtcccttttgcttccacgaggtccaaaccatagtgaacaaggagagcactagcgccacaacgtgagtaggtctatccccgcttcaccttggtctcacttctaacgatcctatctctcactttagtatggccgcagtgtgctgttgtatcttcggcggaatctgctgtgcatgtctaccattctgcatggagctgtgtcatgactcgcatcatttctgtccaaattgcggcgcgaaggttgctatacatccgcatgaagatgaatgcgaagtacagacgtttggaccggactcccctcaggcgattattcaagcgccggggttcattcagcctccgcaggcggttatgaagaactagggtgacgatgtacatgttgaggagtgacggagaaggaatggactgctttgcttgatacctttgtttactctgagacccgcgttactttactattattaatgaaagataagtcgagatgaagcatttgaattttatcatgccctgacgcagttaactgggaccagacatgaagaaactactaggtcgcttaatatctctaactactcttagattgacgttactttactcttaatgaagaaattgtgaacaagcatttgaattcattcatacctgacccatgcaagatggaccagccaccttacacaggtcagggcccgggacctaacaccacgaccccctcaggggatcaccccatcggcattgggcatggtgccaatcagccgctggaacaggtcagccagcatggcagccccgagggggtcgtggaagttgcgaatgaccctcgcaaactcaatcttggtctcccagatgtgtgtgctgagagcctcgattgcctcgcaatcgagcgggatggtgtttgccaggacggcacgacggtcgatgctgtccttgaggttgatgatgccaacctcgaaggcgtgacggtaggggtcccagggggccaccaaggccgcaccggagtgctggctcatgctgtgtaggaaggaaggttagcatgttgtcaattggggtaatatatagggtgagacggtcacgtgtctcattggtttgtttgcataccttgcggtggagataccggtgggaggagtatgaaggatgtgggtgggcgtggtgttatactacacacgtttaatgagatggaagcaggattgggatggttggagatgcagttgtgatgatgcagtgcgataggattgatggaacacacggacgtaagaacgaaagaagtttttcacaagatcgagaaataaatagtcacaccattgccttaagcttaaccgcgacatgggtcggcgtcgagcagagggtccggaacatactacaggctcggcgttgagtagaacgtcgaggaggaaggtgataatgaacaatgatgacattcagatcaaacactatagctttgagcctgtcgctttggcgactaggtgcgcattgacaggcgtaacagcctttccagtttgatagaaagcagtaatattctccatacccaacctctcaaatccgatatgtgagtccactgaagcaccagcattgtgcgacatcatctcaacattcttcatgcttgcaagctccgggctgacgcgtggctcattgtagtgcacatccaagcccgcagcagcaagcttaccactcttcagtgcgtcaacaagggcactctcatcgagcaacttgccacgggcgatattaatcagtcgcgagccgtccttcatctttgccagcagagatgcattgaggagtgtctccccgctaaacggcgttgcaaccatgacacagtctgaaacagcaaggagactgtccatggtcttatggtatgttgccttcgagacggcttccagctgtgcgggcatctgcacgatgtcgtaatagtgaatcttcatgttcaaggccaggaacgccttctcggcagtgcgccggccgatctggccgaagccaatgattccaagtgtgtgtccattggggttgtgtgagaccatcgccaggttgcggtttgcgtcgacaaatgcatcgacatccagtgcgcgtgcggcaatgtgtgaccaagagaacaggcggaatgtggagattatgagccagattgcggcgtcggcgacggattctgtgcatgctgctgcagcattgcagtaaaccacccctataaaatgaagctgttagctatttctcctatatgcagcttcccgatcgctttgttgtatacacacccttcttcgccaaagctgcggtatcaacccagtcaaatccagcacctgcactggcgtagaccttgcaagagtctggtagcagtgagatgagctcctcatcccagttccccatctcgccgccggtattccagaatgggcggtagatggcgaagaaatcgccgaattggcgctctttcagggctcggataaactccggccgagacatgctgtaggaccggcggatctcgaagacatcttggaacttgctatattggtcgtgattccagcggatgtcatcaccgagatggaggacaattggtttggtcattttggatggattttgggttgtatagatcggatcggaggttggaatagggttgggggtatttggtgaggtcaataagaaactagtacatggaaaattgtaaaacttttatcaaaatctcattttctaagctggcaatgtggaattagttaaatatctcttttccgattgtcttgatgtttgttgcggctattgctattctacgccacggctattgagcgggtatcgatctcccggctaatgaaatccgacaccaaccaccgaggtaattattcaagtctaatgaaaggccaaggagaggtaagatggttgtttttcaatggagatgaatatggaagatggccctgattccgagcccattcttcttcgctctgctgggggagttttgctttcattagtggaagcacattctccagtgtccctttaattcggttgtaacgagcatgtcgagactttctgcgtgaattgtgacggcttggtaaaggagttggatctataagaaggattctgtcagtctatatttcatagaagaatggaagaacagtttcataaatgcagcaaatcatgaaaagggaatagaattggacaacaggggcttttttggaagattttaaatcttcctgattggcccttatcataaggacatgaggatgcaaagggtaatccacgtaaagcaagatgaacagaagacatgagcaagaaggaaatgacattgtcgacatgaggcaggcaccttgaagggagataaaacagcaagacgtaccgggtagtgtcatccttgacctcgaattattcgcaagatcgagaggattcatcgctcaatccaggcagagactgtctcgttgagcattgtgtgccacgcagttgtagacatacatctcgtctctgggtaacagaagccttgggtgagtctgcagtttggttatctgtttccccatcccttgagagtatattggagaaaggacctagaacagcaaggtaaggcgaataagaataggataaaatcccttcatcactgcagtgctttatagcttgtaaagaggtggtagagggaggataggagaaagtgaaatcgagtagacgaacgttctcaatagtggctagagacttgacctgaatgctttgatgaacttatcgtaagtttcgagatgttcggtcgcacatctcgatcttctgccattcttgtgttggtatcggggcatctgtccatggatcgagaactttatgattggagacatcgacaaagtcataaagttgcttatgggaatactcgttgtggaagaagaccttccagatttctgcgtgaggagatcgatcatgtcctaatccctaatgacagtaacatctaatatgatcctccattcgcccagatgtgctcagacaccttcctccatgacaggtggcagggttttgactgggtcggtcgaaacaagctacagcgcactacagtgatgagaggatcatcgactgcaagtgccgtggatgaggatagtttgactagtgatataaataagagcattaaatagtaatttggcatttaatgcttaaaattgtgtattacctcttattcttatcaggcaaatataagtcattatgtagggtatctgatactctttaacattcgtctcacttgtctatcacccagagtatcatcaagttgctcattttgactcttttcctatcattttccataattttcatgttttactttggcactctcaccttttaattatactctttctatttgaccttaccaactccctcctcttccgattttataaaaatcactctttattcatacaacatatcccttggatttctttaacttcctacatccacgaatcctgccaaaggctgacaattaagacccttttgactgacttcactgctctgatactccaaaccctctgacccatccagcctcaactatgcagtgccatttaactgagatggcgaaatcaacctcacataccaccacctcctcctcttcctacaccgacaccgagtcctccatctcggccggaaattatgatccctccgaatccctccgaatccatctgactctcattttactggtggtcatgctcagatattctggacaacaacctgaacggagagcgtgacaaatttggactgaggattgaagacgccatatgaaggataatctcacaagagacattctcctcgagacattcctgctttatctcgaaccgacaaatgctccgtgatactcgcttcacttctggcacgtcttgccactagagtttgaaaggtttccttattcagagacgacagggaaaacaattagcgctagaaaggcggcaaggtccaatcttgcattgcttctcacttttgaccttatggtgatggctgtacatgatgcttgatacttgtttacagcccaaaatcatgccacaccccctcctcaatccgaggttgagtgagcggattctgtgcaagtagatcccaatgaaaatatgtacattgtaatgtactcttaattacatatagcagtgagttggccaacgaagatgcaaacgattacagccaagtcgaccgcagactggtatgcgcttgaccaacccccacgagatgcaatgtggctaagcaaagttgcagattcacttggtctgctgaggccagatctcacggtcatattcacggataacatcaactctcagctgctacttacaaagaagggtggcaaatcagccacaaggtggttggcgctaagatacttcttggtcaaggatgcagttgcccaagggcacgtaaatatccttagagtcgacaccaaacagaatctggctgatggatttaccaaggcgcttgcgatggagcaattccaaaacttcgtgagactgctcggtatagcttgaaccaccaaggaaagttcaaattttttcaaccattgcagtacggcatgtcatcatcaacaattctacatcaatcaagggtgaatgtgagatctgtaagggggatgttgggtatccagtaaggctgacaccagctagacgtcattaataaaacatttcactccaatatacagaaaggcaaccaagcggaaaataatacagaggaacgctacagcacagagactcagaccagctgaatacaaatataacaaacagtgcacacgcgctcgccaagatacattacatatcgaagaaaagaaacaaactgaggataaatggattaaagaacataagaacaaaagaacccgcgtttaaccttaagccaacctcgggtcagatggtgatgtcgtgaatctcgcaccacttcttcttgcatgtggcattgccaaaatggtaggatcccccattcgcccatatgtgatcagaaaccttcttccatgatacctttggtggctcgttcacggtcaacccggaattgggcagcgagttgtaagtgtcatggcgctctgcgtgaattgcgacagcttggcaaaggagtcgcatctataataatagatcatgtcagtctatattatcatagaataatggaagaacagttcacaactcacatctcgatcatgccatgcgggctttcgcactcgctggtctttcgacttggtgagagtgcggtatcggcctcgtagcgtagactccgcctccttgaacccgcccaatcgcttgatttccttgtatgatagccctcggctcttgcagtctatgagaaatgcatttctctcataaatgtcctgcaccgtagcttcggtcccgccttgttcttcttcgctctgctggcgggaccgtccttcggtggttgagacggagaaggatggactgaagctgcttgctgggttctggtccggggattcgtattctgtgtcggagataggtggctgtgttggagcgtctcgatgcagtccaggttgatactcgggaccattggtgatttggtagggtccagaatcttgcaaatgggaaatgtagcctatgggactattcgggcccaaagacagaggcgcaggcccaaaaggctccatgggcagtccattccttggctcgggttcattgtattcggctgggtagttgtatgtattggtggccggccaaggtaaattgtaaccatcctgtgtatgccagctgtcttctggtgggctagtgaggtcaggcgtgggataccaagcctcagttgtggtgggtggttgagagataagccattggatacttccaccatagttcagcggctttgtgtcctgaggagtgatggatgagtggggatcgacctgtcttcccgtggggtagttggcgagagtcgggttctggcagttgaattgggtggtggaaaaagcatgctcgtccattttgacatctgggatttcaaaggaggaaagaggaggtgtttccccagtgcctaaaaggaaggaattgctagccattgtgaacattttgccctgtggtgctgggtgagcaagcccagtgtgtgtttcaacattgcgtgtggtgaatggctcgtcaaagtgctcaagtgattcaagatcagattcacagtaagtgcttccgttgcttgaattcgcactgttgaggtctagccgagtcgtgaaaggagacgcgccctgcgaatacacatccatgtgaggatcttccacatggagaggcatgtagcgcttgtcctccgcaagaggtatcgagtttcctggcaaactattgcgattcatcatggttttagcaagctttcgaggacgacgttgtgtttggattgttggagggtgatgtagcaattgaaagttcagagaggaagttgatgtggaggggcaaaagatcgaataccagtcggtaggggaggaggaaagctgtttatcataatcgccaaatgccgaagagtaagtatactccttcgggtacgccatccatggctctggcaccccaggaatagccagcacgtctgccatgtcgaccatagatggagaaaattgaaaataaaaagattaaaaggattcagaagagtattgcccagttttagacggttattgtcttccacgcttcaccgcaattgctggcgaatgttgtacacgggttgtcactgggtgtggacgaccgctatcccgaagatttcctctttgtcagtacacaccggatagtgtggagaaatcgaggagacctgcaggtttgaccgttatggaggttagtgcttttttatatatggagaggtttcaccagaacggtaagaactgattgggcatcacttaccgtatggatataatagccaccgtagactgctagaaggcgatgtcacgagtgaaaagtagggcaaaatttcttcttgtgaccttgatgagcagacaaaagcctctagtggctctcaagagtagctatacttcgaaaggggacggctgttcggcttgagagatcaatatgggtaaggatcagggtgtaggtcgagccgttggatgcaatgcagtctcaggtatatcggcaatgaccttaggagaaaggaggtgaagctccagattgctgtagggttatatctcaggtagattgccaacacggagagattgtttgagagacagtataaaagttggaagtcgaggatgagggatggaattgataaggtttatatatcaatttacgaggagatacagcaaggctagggagcgatattttccgggtcttttaatagacagaatgaatggatctaaccagtgtacatgaaccatgtctatcatccgccagctcatttcgacttctcggcccgtttaatctcagctgaggcccgtgcaattactagatgagcaagaggactgtcggtatgttctaggcatgtaggagacggagagaaacaaagagaaatatagacatgggttggtctcaagacttctgaaccctagccaggtcaaaaatctcaggtatgtaaatcagctggacccccgtcgtaaccgtgatccacttgccgaacgtttcagatctttcctctattgtctagcgtcatgtcttgatttagcctcgatactgtcggaggggaatgaatgtctaggaaatatgtgaaacgggagcgaagagtgaacgggttgtattctcgacggcttcctgaagaagatcttcactcccggccgttaggcccaagttaatatattcccgtcaatatttgtttttctttgccctcgatatctacattttatcccatcctgagggttgggtgaattggccccggaactgcagcccgttggcaacggtcctagcattgctgatctccaccatgtacaaccctaaatagagctgctatgcccgtctgtgggtctacctgattgacaaaccgtctaaagctccatgatttggcggtggctcggccagttttggaatgttccatcctgaccgggtagccacagagagcttctggggaagcctaagtggcatccgggccaatcagatcaaggggcccagtccaacctgcttgagaaaaagcaatgtaaacaccatagcggtagaagcaatttcctggttggagctggttggacaggaacttgccgactgacgtgagctatctagtctttgaggctctatcgcccaatactaatgccaacatgagttcatcgggccttacgaaatgcagtgttaaagatcgacaagatcctagccagaatattttctgttgggatttggaatatagtaaagctataattaggtgcattgaactttcaaagcaaaatatgtcattagcttccacgattgccgagagaatacaactaacacggtgaacttaacaaaagaactcccgagccccttttccccggatctccactgtctatagacggacctattcaaaagaagcttctttaacgaccgctggggtggcctaggtggcgttgaaaccgaagggatcaaaaacgagcctgcagcagcacgaacgcgtaaagattccgtccggtcccctagctaggggaagacctcagctcctgattctgtgggaaagccccgagggaatttctttctttgaggcaatgtttctgttagtgttacagcttcgcagagttaccgcggaggtaggtttgggatttatctagtttccaggttgcaggtgctcgatcgagcgctaggcttcatttcccgcatatgcggatcatatttatggatcttattattattccataaataccattacccgatgatttatcctatgagacagcatcaagatccgtaatatccggaacaaatctggggaaggggatggaaaagacaggacggtgagttgtgttgacacgaacagtggagggatgatcagcggagaaccaaaacaagccggaaagaacctatcaaaaaagcaaaaagaggttggtgctatctaatttaaaagggatctctcggcagcctgttggttgcccgttcgttgtcttttgggtattgattggttgaattagggcttcagggatcccagataccggggtggtgggtaggtactttagcgtgccttagtgtagtttatctctgatttttggcactaaaaatgccaagtagatcaacaggttgaggtgcattagctgctttgctaaaaacagaaacaaagcctacaacttacgataatttggaaacgtgacgtagaggctgggagattcttgttcaagactcggcttcttcctaacagggaaagccttgcttgtcgtagaccaggaattggaatttctgattgagacataagactcaattccgagtttggagcaacatccagccgactgcatttcaggtggcttgctggcatgtagctatgcactgtggcggttaatgcgctaacaactcccactgaaaaagatattgtgacacaatgttaggttttgtttcattatattttacctcccaccaaaggtttcgggaagtaggagatttcgaattatagctcctagagctggtagtacttcttcatcttccatggggtgccggggagatgcttctcatggatccggacttgagcgggggacaagcttatcagttcccctagtttcctgctctcaatagggaaaatagttgtttagtatagactttcataaggagcacgcaatataagcccagcccggtagaatgcaacgcaggggaaaatgccacacaaagacatcgaggcaatcgcaatagtagaacatgttatctacttgactaagcacccctgtagagcttatgatataagatttgccggtaggaaatgccataaagaaggaattagtgacggccatccccggcgcagaggccagacgtttgaactccccgtcgtgttcccgcttccgtcggccagctgcgtcgttccgggacattaaccagtcaaagagtcggtcaataaggagtagattgagtgaaatgagccggttcgcagccctagtcgaagtgtacagtatcttcggggaggtcatgaaagtgcgacggtgtaggtcgatgggaaattatcttgtttcaattgttgatagatcagttagaccgaatgaaggatatcaacagttgatagaaatgaagaatatctatgcacacatagacacaaccgatatatgttcggaagctggtgtatgctaagcaaaatgatctctcggttcttttttagctagaactaggaagcagctgagaagtcaagatgaaatgcattcacggaaataagccctgatgttgctagttcagtcctgtagcatccttaaaatagcgtatagttctaacttctaaacacttgcgagaatctgcgacctctttaagaatagaataagagagacgtgagattcatgaagtcaccccttaccctggtttttgaagaaggcgcaaccctaggatatataagatcgcaaatatcacaatgatttcgaagaatgataacagcgcttacactcttcggctgtctccagcagtcggagtagtaaccaacacccctgtattttgaaatttataattagaaacgaagctaagtagcccatcctacgttttatatatcaacgaaatagaagcggtacatgttgggctgcttattgttcatagttctgtttcaatttagggtttactgtcggacatgttattatgttattacatgttcctaaaaccgagagttaagcaattctaatggcaatagcatcctgacttggagcagtctctgagtacatttccttttcctctttttggaaaggtagagggaacgaggccgcacgccacatagaacagcgtgtataatcttctaatatcttaagaaaataagtatgaaacctagccaatccatgcatggtcggggcaccgacgcggtctaaatactcgcgtcaatagtttgaccaagtcatattgatatcgtgaaattcacatggggtacatgccaattcaagccagttcgtggcgacgtacttcgtaatccgtgaacttacgggaatttctagactcatggtatcatctaggctttcatcgaactgcataattcctatttttccctgaagcattgctcgtagtccttgaccaattcggctccgatgccggatgtgctaagttttcggaccccgtataggatggcgatcaccgtacacataggagcacaattcctgtagctctagaaccttagccgaaatcttcccatagaaggtgggaatatagaattcagatactatgcccgagattggccgtacattgggtcttgatctatactatatatcagaagagggggtctgaacgcgtaaatagacttcgctaagaagataatgggtgtttctgcggatactggggtgttaaaatagaagagtcttcattgatatcaaaatactcagcatcatgacctccgctattaatgcaaaacatcaacggcaaatgattggaagtttgagatatggtcggaaaaatcaaaactatccagacattgtacctccattggaggaggcggaggttgaaaatgtccatgctgctcaattgcctattttggatttttaagtaaggagagaaaacgacttccagggaagttagttggacgcggggcactagaaacttccagatgaaagactacatagaatatagtgcatgcaataagactacggcttaactaatggcgtatcccatatttacggtatgacatggtagatgcaggtaaacaatagaaaagggaggttggcatggctgcgagagatatgtaagagacatataatgtgagaattggtcaaggaaataataggagaaaacatatacaaacgaacagatagtacaaccggccggccgcaccgtcttgttgacaattcaagtgcccaaatgaactatttcttcaatgatgagcagcataaggcccacgcggagttggtgctgtgtgatccgattcctagggaatgcaagaacccccttaagccgtccgcatctcaacttcagaatgaacgcgccagactacttgtgttcatggttggaggtggtgcgatgttcattcataatgaggggactggtattacaagttggaagtcaagtgcaagtagtccaccaggagcaatgtaggaaagtcatcgtattttaaaaagatttagtcatacgcagagcggcaagacacataacggtgacgtcgcatgagtgcccaacgagctgaatcttggccagacaatccgaaaccagactagaagctggatttctagagttgcttagctgccagggctggctgagatatcgggatcatgtatagtggggtgtgaaacccgttaaggttgcagcattctcgataggcttggcgtccctgggaccctgatggccgccaacgtttcgacaaggtagaatagctgcacagtataacacctgaatctcagccgttgattgtcaggctgggcttatccgttggagtgtggtgtacatggtcctgtacggcagcctgaaaccgggaaaagtctggcaccacatccctagcaatgtcatggtctaatgatgttgtttgttggttaactgtagtcggctttccgaggatgaagcgatactgtcaggccaccctttacgaccaagttgatttgcagccgcgcgagacacttgttcgtggtagccagtaaagcgccgcaccagttgtcagatggaggtgggccgtattgcgacaatgtaggttgactagctttttgagagtgaaaggttggtctaatgcaaaatcaggtgacggggctaagggtatgggaatgaagttagaaatacaatacagaactcgttcattgggtatcgaaagaaacaagaaagaccccacgaagacgatgcaaggggatctagtaaagaccgaggtgaagttgagcctccaggccgtctggggtgtaggtacgaatgcaaccaagaaagcattatgaagaatcctcgaagctagaatcggaggaatccgacattgaggagtcccttaccgggacagggacaggagcgccgatactctccaaacctcgagatttttccagagctccattggaaccatcgagctttgtattaggatcaacaccagcttcctttctgagtcgctcatagttatcgccagcttctttgatcatcgcctggatctccacctcacgaactgcgatatctgccttctccttcctcagttcctccatccggctgatcatctgtgtttttgcgacttccatagatgtcagagacatgcgcaacctttcaaaactgctagccagtcgtggaagagatgtcactttgggaggagtcctcggacgatcaataccgcttgacttgccacgacccatggccgaatgaacctgagcggcttcataggcagccttttcctccaagtcagaatcgtcttcgtcggagataccctcagcatcctcaataaggtcacgcattgcttcacgatccttccgcttcttctcgcgctctgcctttcggccgagcgccattttgccatcctccgtgaaggcctcgaacccttccgcaaagtcctcgtcgtcccgaactagtcttgtatcttgttcgacttctttatctcctcttacaaccgcgtcccagtcgtcagtgtgggccgcattgttcacgtccaatgaaatgaactcgtcctccgcaccgtgttccatagctaggcgtgcgcgccgggcttttttctctcggatctcggcttcgcttgggatatgtgcttgtgccgggagagtcataatctccccaaacttagctgcaacatcgacaaccttgctggtttcatcgtcggtagttgtcttcggcgttgagggcgtggaatcgcgaagttccttcaagtagtcatggctataggtaggccggtcttggtcctgaccgactcgtgcagtgattttctcagataacagggaaggaagttgaccggcactttgttctattgccttgcgtccaagaccgtggcgttttggtgggactacttcgctgtcttggtctccatcgtttgacgtctcggggccgaaggataactgcaacttggatctcagcttcggcctagaggaagctggccgcttaacgaccggctctagaaatctccatgtcagcttcgatcgtggtaggcgaatatctagggtagaaaaaagtaatcttagtccacatacctggcgcaacgcctccctcgtcctcctcgtcatccctgccaaccttgcggggctttctgcgattggcaaatttgctgctcatatttggaataacctagcaatcaaaagaggtaacgaagcgatgcaagttggtggcgtgagaggtgtgaacatgaagctgccagctcttatcgcatatctcatatccggaatatcgttcctccggcacagcttgcaccaaactcccaaagtcatcgcggtatcttgaatcttgacaaaccccaagatacccaagcaactcgcccaacatgcctcaagctcagcctgaattgaagaaggttagtgccactgctaatatatgggtctttattgtcctaagatctcagctgacgtcgtgtctttcgtgcagtacatggagaagcgggtcttctgccaactgaatggcaaccgcaaagtcattggtatccttcgtggctacgatgtatgtgtacacccaatgatccagacttcgctatgtcggggttcccgcggctcgttgttgaagataggaggatgacggtccgatcgcacgcggaataactaaccatgctttcgcgcaggtcttcatgaacattgtcttagatgaggcattcgaggagaaggatggcgcagagaaggttgccattggcatggttgtatgttcaatccctatggactagctaagatccccgctaatggatacgcattatcaggtcattcgcggcaactccgtcgtgatgctcgaggctctcgagcgcatatccgataaataagctacgcatctacacgcacaatctacgacgtttctttgattgaaggggcacgcacataggcaccactcgatcaccgagtgctgggaaaagagctaatgctactgggagtttctgggtcggtttctcttatgggaacaatcaaaaccttttttctgttctattttttttctgctcgtttgctacggcgcattttagacgactatggctatcccaatgactttctgactggtacgtctacactagaaatttaccaggggggatgaacacaaggcacaactagttggtattggaatcggaagataaagctgaatcaatattacgcctgggagcatgctttggctccatcctcctgcctgggtcgatgagagagggtagagataataaagagataatgataaaatacatgtgatattcgaaggaacaacgttggatattcatgtgggtcgaccaccaaacttgagcttcagcttgggtgtagacgtggtaggggctttgggggttgcgctttgcgcaggtgatggtcttgggatgtgaattttggggaaatgattgggagtaggagttcctggagccaggccagttttggactgcttgaacgtaatgcgggttgatgatggtgcgtgcatgccctggtcctcgcgcttgcgtttcgaagccagacccatgcggggtttgttagatcgatagaaacgtaacttgccatggccttggttttgcacactccaatatcgaggaagtttcatccgcacgagcttggaagtgattgggtcgtacagtgtacggcaaaggtcggtgagctcggaaagttccaagagacccatggacggtgagttacatgctgcccacatacattccttcatagatgtatcgccagaaagctctcgtttgagggcttcgatggcgccaggaatagtctggcgtcgtgcgatgtcatctcggcggatttgggtagatgattcttgttcgatgatcaaaccaccattttgggaggcttcggtttgttgaggacgaccgaaagcaatctgtgctagggcctgacctagcaaacgtaaagattggtggcgtatccagggcgaggaatcggccgataatgtgaacataagccaacgaagaagctccgggctgtgggaaatatccaggtcgatcaagcattggaaggcttgcatccggagaaggtcgtaggttcccgctcgcgtgtatggaatgaaacgcatcaaatccaggtccatcatcttggtttgcattaattgcgcctggcattgaagagcagcgcgggagtagaggttctggaaagagctagaccattcgtccatgcgtcgatatcggtcaaactcggcgatagcatccttgtccagttgttcctcggcctgagcctcgaggacacgttccatatcgaaatggtctaattcctcgtccatccgcacctcgctcttaccaagcatcgcatgacagagggacttcatcaaggaggcaacatagaagttatccgagtactcattgttcgagttgtcattgaacttgagtttatcgaaaaggaatcgcttcacccttaatggagttttgccactattgtcccggactttagagattgcgtcagggatgacttgctgaaggatgtaggccgctcggtcagagaagtcattcgatcgagtcatgggcgatcccgggagacagaaaagctcctggaacgccttctcaagatgatacagtccaacccaatcaatctcttccttggcatgttttaccaaggcacgcgcagccgtagtacgtatgccatggaagtatcgactatccatgagcgttcgaacaaagatcgtagaaatcagagggtgctctcgttgagcagtcatgtattgtaatgactgataatgttagcatagtgactcaacttttcaagacagcagtataaattacctcgagttgggccacaacatctcgatcttgctgaagctgcgagagatacatgtaccctggcataccgagagacagtttacagatccactcgaagtctgcatccattcgtatccactcataggattcctgtcccattcgctcctcgtcctctttcgtccaatcagccaaacgccaagcctgtgtctcttcttcggtttgaagcacatcccccaggcagtacagcagaacctcttcttgaacttccgtatcgcccgaggccacggctctttctctttgttttttgttgcgtttgagccttttgtacttcgtgttgtatggaatgtcgaatttcgtcacgccctccttgatctcaacgatgtgctcataaggagttccatctgcttcgtgaatccgaagggtcattgaccctgtgaagaccggctgcactgcgcccgcgtagacgtgccggacctcttccttcacgtcgcgcaagaatgaatccttgtcgagatctcgagggggttggggttctgattggacttgtctgatcatcatttcaactacgagcttcttcttgttgaatcgctgggttgcttggaatcgtggacatcccgccccgtatacccattgttggaagaatacgtctaatttcgcatgtcccagtcgctcacaggttttttggaacagggaggatgtgacggctccattgggtatatcacccatgcgagagttgaggaaaagtcgagaaataatgcgagacatcgtggccttaccactcgccttggtcagtcggcgatcgagaatgaacaagaccaaaggcgctttcaatgcaacaaagcgatattcggaggggtcaaccttgagaatgttacccatgtcgtatatagaggggcgctcgaagtctaggtcgcagacttgatcagacatctgcttcaatctgaaacggtattcgttgtttccgcaaagctttctcatgaacgtgtctgtaatgtaccatgccacacccaccgtaacccacgtatccgagggttccgcaggaatgatgttgattccagtccactgacaggccagaccgtgcacctgagcccgagtagagtcatacatggggtcgatcatctcggctgggaagagcaggtggctgctgcatattgacatacatgcagtgggaaggctatcggttggtaaatcgtcgacgaaacaaatcttgtaactgccgaatggataagacccgtacgacaaagaaaagaagtcaatcgcctgggccatgggaaaactgctgttttggacttcatcggctctacccgggaggcagaatgcgtgcaaaggaatagcattttggccaagttgctcatcctggtcactttcacgaaagtcggccaggttgacatactcgaatggaccaatggcgaagccaatttgcaaggctcccaatggtgaatatgacgcaaatgaaactgttttgcgggtgtggtctttgggatcgacaatgtcatctgtcaggtcgccggagcacaccactgacatatcaaggccctcgtcgtccggagaaagttggcgggttggcgcttttgggcgggatggggtcgctgcaccggccgcatcttgggtcttccggtcaaaaacataaccaagcgagctgggacatgtgatagaaacctcccaggtacatcgcgaggacatatcatccacacatgggaacaggggacagccgataccagactcgagtgagttagtggtgtaagcatgaggataccgtcgatcaccattttcgacaccgacgaattgtaatccatcccgaatattgtcaataacaaattcgatgttcactgtcaaagccgtgaatcgtggaaggtttgcctctggcgccctggtactcgaaggaccatccacattgtccacagtagattgtagcgcgatttgatcctgtgcttcggccgaagatgggtctagttcatcgatgcggacaccctttggaattgcgatgggcagggtaggtcttgggggagtttgtaacaggctgtgaatcttcggtgtcagtcgctcgtgatagtgtacaccgtagagttgtagcgactcgtagtgatctgtgtattttgttgttgcaggcttgccgttaacgctcagctgcttaatctcgccttgtcgaaaattcaaccagattgtcccgagatctctgcggcgagggtgaattgtgatttccgtccttcccttgaggcttttggatgctagatcaatctcaagttcgactttttgatgtcccacactgaatcccagatcaaactggcgtgccgcggcaccagcgggcagatcgacaacactcggcatgatattctcgtcgaggcctgcggaaataatgtcccagagcctgtcctccagtatcttgaagattcctcagtgacgagatgcgcggggagcgcttcgaagaccatccaccgtcatatccaaccagactcaatatgtgattgtagtattgagggcggaaaaaaaattcgaggagcacttcgcgtggcgcagatcgagctccagatgacgatgaaatgcgagatgggcgattacgcgattatggtgcacggtgtatcgcacggcgctggggtggatcgtaggttgaagaaagatttaagtgagccgcaattaggaagatcgagggcagattagctgcaacaatgcgactcaagtccgaacaatgcactagcaaatcccgtgtggtctcagccaagttgagcttcccttgttcgcgttcccgatgcggagcaaggcacgtgatttcaacctgaaaatccatcttgaaacgcttcctacctctccttttctccacgtatccttgagcgccgagatttgtgtttaaaggcatgatttgattcgctgtgcatttctccattatacccacttgtttgccgaccgcgctatgaactgaggtgctggtgtttcccccgactatactacaactctgcgcggtgacacggcccaatcttcaaaaatgagcgcgatatatcgcatggtccaaggttggtgatatgaagccattgactggcatatttgttcctactcacttgctaattcgaaccttcaactcatacagagacccaagattccctctccgacgaagccctactaccccttaagtcctacaagtattcgagtgtcgataagtcgttcatttctcggtatatcttgaagcactacgtatgacagccttaccttgcccgatcgttaactcggaataaacaattgactcttcccctagtggaatgccttcgtcgaacttgtgccgatgtggatggccccgaacatggtgacccttcttgggttcatgtggatcgtggccaatatcttcatcattcagattttcgtcccagatatggtgggacctgtgagtgttcctgttccttactgggtgttttatcggaagtggcgagttaatcggaaatttcagggtccctcttggatttacttcagctttgcgcttggcttgtggatgtgagtgaccggctacccctccatccacatgatgctaactcatacgaaataggtattcgaccctcgacaatgtggatggtaaacaggcacgccgaaccggcacgtctagcggactgggagaactttttgagtttgtaccgccctccgaaaagccatggatggatcactaacaaggtacagtcacggtatcgactctttgaactgcaccctggccagtctgctttcgacagccgcaatgggctatggatcgtcgcagcttggtgcttggaccgcactcgtgccttgcctggccatgtatttctcgacatgggagacgttccacacccacacgctctacctcggctacttcaatggcccgactgagggcctccttatcatctgtggaattattatttcctccggaatatggggccctgcgatgtggtctaaacccatcattggattccttgatttcccccaaatcttcggcaacaactccgtcaaggacctctgggtcccatttctcatggctagtttcttcctcgcacatctccccgggtgtattatgaatgtagctgcggcgcgcaagaagcagggtctgccgttcgccccgttgcttaaggagttggtgcctatcctcgccttcactttctgcaacatcgcatggctgttctcgccttattcgactgttctttctgggaaccacctcattttgttctgctggattatcgcattcgtcttcggacgaatgaccaccatgatcattttggcacatcttctgagacagcccttccccctttggacagtgatgcaggctcccctcattgctggggcgatcctcatcaacctgcccatgatcgggttcccggtcattgccccctggctggaactcttatatctctgggtgtacctggtcttcgccctggttatctacatgcattgggcggtcctcgtcatcaaccgcatcaccactttcctcggcatcaactgccttactattcgaaaggataaggccgctgcaagagacagagcctatcgcaacctcggtgaatcgtcccacatcgatcagtctcgcgcttcgactgacacatccaagacacattaacttagtatgcgccacactatcttctatggacgaattgacgatcgacactagttccctgttagagtggccaaaagcgccctggccggcgcattgtttaattgttcaacctcattgtaattatgaacatgtccattccttctacgtgtgttaacatcttgatctgatgagagatataacaaatcccagaggggtggattttgatgaaatccggcatggaaattgtaccctgctattctgcacttttgtacttacaagattattaatatttgtgaatagatcaaaatgatttaaatgaaacccagttcaagttcattaatcgagagaaataatacaggaaattagaaaaggtacgcccaaagaagaacaatcaacgctggcgaaaagagcaaaacagaaaaaattacaaaaacaccgccaacaaaaagttcaaatgggattctgctcccaaattttcatttgtttcctccaagtccaagagcgtcagtcagacctcccagaccaagtccattgattattttatccaatccaagactgccaagcagtccattcaacaatccaccgagaccaagaccatcaagcagacgaccaaccaagccaagcacaccagtaagcaacaagccaacggcagcgatgatctggaacaacggctcagagagcagaccccagagggggttcagcgctttcttggcgtgaggcatatcagcaatacgtttcttgccgttgtcaatggtcttgacaaccgtctcagtgagctccttgatcaggtcggcaagctgatactcctcaggagtggcatcgcgagaagcagcgcgcgccttagcggtcgcggcgatgcgtccatcggggtcaagagcgcggatggctccgttgcactcttgcagaatgcggccgccttcttcgaggagcggcttgacggtttgaacaagcttctcctcgtcaaggtcctccttcttggtatggtcggctttatcgcaggcctgcaagttatgttagtatattgcttttgaggtcttcaatgtcgggttggaacttacctcagtgatctgcttacacacaggcttgactcggtcaagagtctggctaaggatagagatcatcttctcggcgagctgtcggtcggactcagccttcgccgcagcctcctgttcttcggccgtgggcccctcctcgacctcctcctcgggctcggggatattctcaagcaaggtgcattcgccgatcttattgccatcgttgtcaatgacatagccgttgtcatcaatactcttgccgatcagtgtggcgaggttacccgcagtcagcttgccaataaggttgccgtcctcatcgcggacttcgccctccttattgaccttgcgaccagacatagggttgatatctcgcttcttctcctcaggctcccaacgctcggccttaccgatagagttgccgttcttatcgaggacgtcaccctcctcgtcaaccttacggccaaggagacgcttggcgtcgccttcaattagacgtccgatgatcttgtcaccgtcttgcacaactccatctttgccgacaatagcgttatcgaatccaaagaatggaccttcagccttatcttgctcagcgccagggataagcccagcgcgtccaacaaccttaccattgtcaccccagatttgacccttgccatcgaccttacatccagcgaggcgcttatcaccttcgaggatacgtccaacgactgcaccagtagtaggatcaacaacattgccagacttattaacaaccttgccatcgagaatagagaggtcttcttcgggagcgggctcctcctcggggggctcgtagggctcagcacggcccttgacatttccgtacttatcggtgatctctccatcctcgtcgacagcacgaccacgaagcttcttagcctcgccttcgacaagcttaccaacaatggatccctcatcatcctcgacgaatccatccttggtcacaaagaggctgtccatgccagcgaagataccctcgggcttactgtcgatctcatcctcggggataagctccacacggccaatgaccttctttccgtcgtaaatctcaccctcgtcaatcttcttaccggcgagctccttggggttaccctcgacaacacgggcaatcggatagccgtcgggtccgatgacatagcctgccttgttgcatgtgaggccattgacagcggaaaagtcaggaccagcctcttcctcctcctcgggctcttcctcgggttcgaggcgctcagcccgtccaaggacgttacccttgcggtcgaggatttcgccatcctcgtcaacgccacggccgctcagtttcttcgcatcgccttcgatcagacggccgacgcgggtcgagttctcgtcgaccacaaagccgtcttcaccgacaacgagaccctctagaccggagaaggggccttcgtcgccatcgtgttcctcgatagggagtgccttagcttggccgatcacattgccgcggttgtcccagaactggcccttgtcgtcgagtgtcgagccgagcttagctagtttcttggggtcaccttcggtcacttgaccaacgggcttgccggttgcttcgtcgatgatgtagccgagcttgttgcagaccttgccttcgagggtctccaatccggggatattttcctcgacatcttcggccgcatcctcgacggtgtcctgggcatcttcggcggcatcttcggcaccttcgaccttgtcgtcgagggcatcggttgcaccttcggttgcaccttcggtggcatcttcggcggcatctttggcgccttcgaccttgtcgtcgggggcatcggtaacaccttcggcggtctcttcagcggcatccttggcgtcttcggcggtatcttcggcaccttcaaccttgtcttcggcggtatccttggcgtcgtcgacattatcctcgaggttaatcttgccatcttcggcggtgtccgtagcatcgtcgacagcgccatcaacggcatcagtagcatcttctgcgtcgggggcggcatcttcggcggtagacttagccttgtcgacattcccttcggcatcggaaacaccgtcttcaacctcatcagccgcgccatcaacagcgctcttagcctgatcggcggggatatcgtcctgagcatcttcgtactgatcctcaacatctcccttagcgccatcgaccttgtcagtggcgtcaccagtggcctcttcgatggccttcttctgatcctcaacaggaaccaaatcaacacggccaatgggatcgccatcttcatcaacaatttcaccgtcgtcgttgagggtatacccgataagatcttcagggtcaccctccacaatacggccgacgatctgaccagcagcgttcttgataacaccgccatcagaaacagggaggccttcaagctgagcgatatccgtaacaacgttctcgagatcagcctctccgacgttctcctgggcgtcatcggcggcgttcttagctttgtccgcgacctcgtgcaagatatcgacgcgaccaatcaaatcaccttcctcgtcaacaatctcgccgtcatcaccaacggtttgtccgacgagatcctctggatccccctcgacaaccttgccaatggggttcccatcctgtcctaggatattgccgccctcggcgacatcaagacccttcaaagcagacaggtcgaacggcacgggtaggttatcggtagcagtcttggtggcatccttggcgccacttgtgacactttcagcactcttctcggctgtctccttcgtcttgccagcgacatccttagccttgccggccaagctggagccgccgcggctgagtggggctgcggagccagaggcagaaggcgcctgggatgcggcgtcgtcgggtggggagacggggcggcgctgctcggtgcgtctctttgacttcggggagggtgtctctgggatagactgctcgtcgacgtcgtcttcaattggttcgggggctttctgggagagtttgcggggtgtggcggtcttctttgtgaccttggggcttgcggtgacagtgctgggcttgctggctgcgctggagccggaggctttgcgggctttggcgggggttccggccttggagcccagctttgggggtgctttgttcacggcgggggaagacatgcttgtttcgggtttggatattttggtttcaagatgatttgttatacagaaatcaaaatccagtcggataattgcaaattggaatgcagttgtgtccgctaaaggcgtgggtatacttcgtaaaggcgtatgtgaaatataatgtacaaatcccgggaacaggtatagttcgggagtataatagttatgttgttgtttctagatgagacaaatagaataggaatgaatattgaatagaataaaccctggtacgattactggtgtttataagaagaggtcagtgattctgatatcatcgcaaaagtccatcatagctgtctacctagagactgtaaccaggcaggacacatgcagagcttactacgtcatggaccattgatatcataacgccttttcctataatcatttcttgaaatcccagttcgggggatcggcatagagctaatctacacgatgctcggttagggcgtgatacagtaggcgccgttagcatagcatcatcggcatcataaagcggggcaattagacgtgccaagcagatatttgtctgggaattggtcgatcgatgcgatacttccagggtaggctcacgaatcagaggcccgggactgtgatattgaggggaatgtggcttaatctgagttaaaacgagggtggaggtggagctccgtgctactccagcatggaagcatatacgtctgattcgttgcatgaatgactacaatatcgaatccatccataccatgttcctggccaggtacgtcaagtcccaaggttctagattatctggacagtaaaatatgcccaaagcaacatgattggtcagatagcagtgcatatccatggatattccccgaagccacgctatgccagatgtgggcgaacaaatcacaaagttctatcaggaaggccacatgtgcatatgtgaaagtcgcctccactgcctgtcactgttcttgtttcaggaaaaaatcaaaaaggtcaccagctgcacttcgaatcgcattacatcagaagtcatatgagaacccttgaacagtgcaactatccataactcgtttctccacgcgggcagttagtacaatataggaatcatttacaataagcatattttcaatgacgatgctcaaatatatttgcattcgccatattattcgcaagtcgtagattcagccctaaacaagagaaatcccaagtaaaaccggataatggtcggggtaggtccctgtcggaggtatgaggtatgatatcatttcaatctatttgggtggagagttcagccacacaagtcattggctgatatcatcgtgcaaattcaagaaatattgtttcaaagatccatggtattctctaaatggtaggcttgatatcttgtagttgcaatatactatactatattataactcgtgcaacggctactccgtctgtacatgaattctccggttatcaactaccgaaatcaagatttgcctccacacctcttggcgtctgtgcatttttctttttttggatcgatcgactctacggagtacattgaatgacattgtgctaatataccagacgatagcaaggttctggatataaattgcaagatacaagatgttctcatccaaatctgataccctattcttattttgtattctagagtctagaccaaccctccataatataaagaatgcttgtatttgctcatccaatctcaagatcactctatacttgacttccgatcgagatcgatcggtgtctcttcccgctggtacatcctgggcaagactttagtgttcgccaccgactattgcccgaaatggataggataaacagaatgcatggtactctagctacaacaacgtatgttcagaagttaaaataaattgatagttgctcatcatggacgctttattttgtacaaccaaaaataaactcgtagcattaccttggaaggtaactatggctgtgctactagttagttatggctgtgctgataaattatgtaatcagggtctgtggcgggccattttataactagttcgtggttcctcctgagaatgcattagaaaaaccaggatccccgcctcagggctcagatcaatcactgaagaagaagcttccaagattatccgcagaaagaccaccgtaccctcgcagtccgcagtttcattgacttcttcgggaaactgcctcgatccagctcgatattgctacatacgcagtctacacagatgaatacagtcgtcactcaaggctagaaggcttcaccactacatctccgcggaatatactccgtatccgcgaggtattcgtgtctcttggcggctccactccggcccgagctccgctagctaaacagcgaatctaaagtcgaacgttttctttgacgcacttcagactccatatggatcgcagaattatgtgcgatatagttgactatttacgttggcgatgacatacgaggtttgctttttgatactagagaagggagcgacagaagtatgtacgacaatatatattagacttgtgaattgttgaaataaaagatgagtagaactgaaatctccaacaagaaatgcaaagtcttctatgttccttgtaaagctttgaggcttgacatagatcaatgagaaagaaataacaggcagttcatagagacattcttaaatccttcagctaacagacgaggagcaacgtcgagatatcctggatcgcgctagatgtggcaattatttccgtaaccattgtatacgagcgttattttaagttggagaagctgctttaatttcagccactaggccctaattgaggccgttatccaaggcgcttgagacccactgcttgatagacgcggtcagctccggtatattaaacgcatttgattgttcgagctagtatagcttcctcgtatagaattaggctaagcatcgttagcgtcgcctaatctccaccattttaggttccaccagggaccaatgtcaccctgcccaggtacttggctatttcaagcttagcccttgtagtgtcgagatcgtttgaaactgccacacttactcctttcgttttttgttttctttctcatgtaaggttatttgttgtcatccgaattacatattctcacctttccttgtaatgtttgaaaagcggcgaggacatgattcacaagtggttcctctggctcacctgcctggccgggggtggagtcgaggcattgtcactccaccagcgggacaaaccagcaattgtcaagatcccagttcagcgcgtagagaacgttgccacccggcttcagaaacgaatatctacagtctcggcaccatttgaagttcaggtatggcttccttgctggagtctctacatagaatgactgaccccctttataggaggaaccagaatttgcaagattctttaggagatccaagttcgattggatacaagtagcgggtatctcgcgataaccgcgtccaactcaaactattgtgaatcgacaaacgaagaagcatacttcaacatcagtagcttctcaacgtatcaggtgctcgatcacgatttcaatgcgacatattatcaggaccatattctgacgggagacttcgcacacgagaaagtggcgatcaatggagccattatacccgccatggaactaggtgtcaactttggaatcgatggtgacaatgttcttggcctagaaaaccttgtgggccgagaatcagatgcccctgcgaggatcctccaggctttgatgaaaaccggtgacatcaaatcagccgcgtacagtctgtggatggatgactctattggaaccataggaagcattccctttggtggtgtcaacacggcaaagtacgtcggagaacatgcataccatgtctattccagctatcaacggcgtccaccatctccccgtagccctggtgacagggattgcaattcaagccggcggtgcctccaagaacacgacatccgatttacctttctacgtggctctggactcggcggtgtcatggacatatctcccagatggggttatcgaacagatctataaagacttgggtgcttagtattatggcgatgtcgggagactcaactgcaccgtgggacaaaaaggctataatgtgacatttacattcaccgatttcgatattagcatcccagtgagtgatttcatcctggggggtgatggcgaggtatgcattttcagcattgtacccagtggcggacaaaccgcagtgctaggtgctacgtttttgcagagcatctatgtggtctatgatttgtccaacaacgagatatccatagcgccgacaaacttcagttcgggtgaagacaacatcttggcaatcggcagtgggtcgagtgcgatctctgggggcggtgtctgtgtcggtcactgcatgtgccatagtcccaaccactgtcaccgaaccaaatccgatcagattttttccttctacctccgtttcaagtgcccagagtgccacttcgactagcaagggctgggcaatagctccgactggaagtcccaacagagttatggctggtcttattggtgcagggctcctaatcgtgctataatattatccgagaagggtgaatctgtcccagtcagtgattcaattcagggtgattgcgagtggccagatattcagccttgtacccgcaatgctaggtgatgtggtttttgtaatatacgtgagacattaaatgtgagggtaggtggtaagatagcaggacgcttctacattgtcagactctgttatgaatgatttaaattcatctcagtaaggggccgaggtcttatcagcttcctctgccactttcttggtctctaatgcgcctcaaaatataatgttctggggtcagcttgagccgcttatccgatgtcagtgctctacttaataagagaatagaaaagtacacatatcaaggtcatgtgagcgcaccgggtctagacagcgagccgggtaatcactgagtaatcaactagcccgatgaataagagagtctctagtatcctatagagaagatcgcatgatttgtatgagttaggtaaaccaacgaccaagtactatagtacaggagttgggagtaatgagtgcaggatcggtcctcatagggccgtacatgatcacatgacagatttctgggatctcactaggatagcccgtgaatatatcaattcgcaggtagaatgtatcaaggtgaaatctagcagcgaggtgggtcaaaatcaaacccgctcttgtggaagagcccaatcttccgtatggggctcacgccgccgagcgtgagctttcttccgctgccgtctctctggactgagtttcgccattggaattgcagaacatggccaggaaggtatctctatcaagatctccattgacaagcctacttttgtttttgacggacccaccgtgtaaatgatgctctctggtggaagacgaatcgtaagcgcgggcaacgtctccattaaagacctgagcagagtgatcgatgtcggtgtttgtataacagtgcttgatatggctgggagattggatattgtcggtaccatcgaaagaggtgctgttactttggcgatctaggggtggcgagatatgattagcaagggatgagatggttaagtgagcggacagagacaccttgatcatgacccggtggatgacctctgacgaaccccatggagcgaacttgctcatccgaaaaggaaaaggagcgcgtctcaagggaacggtcacgatcctgagtgtaggtggcgagaccccactcactatgacctagtggaagctctagggccgagtgagaggctccatgggcattcaccgaaggatgaggggccgataggtatgcttccatttcccgacttgagggaccggatgcttgagttgggcagatcggcatagcttatagtagcatgagcgactaagggtagtagaagaggaagaccgtgggaaaactaaagtgggcgcgacaagagccggggcagatggctcttaaagagcgtccatgacagggggtaacaatgcagtacgcagatatgccgataacgatctagtcgaatgcaggatgatcagatcacaagtggcggcaggtgcggatggtaatgagggtctgatcgcccaggcgattgggcgaaccaagcataggtattaaacgacggggcggtgaactcaatctgagaggcaatcgttacggggcttgacattagtaccggactgtatagatatcatagcagatgagaagattgacaggggaaagatttacccagtaaagcagacaggaaatttacaaggacagatatatctcgagattctgctgtcggtcgcgactttcttggggagtactgtacatacgagacactctcctcccagcaaccaaagaataaagcgcctgggaaaaagaatagcggacagccaaacacagcaagccactgctgcaattgaacagcctggatgcattagcccgccgtattcgcctacgcgccgaatcattgatcgtaggattgtctagcctccaaatcacttcgcattagcggctcttcgatcccatggaacgcagtgaacgctagttcgccttgcgccctccgttttccggagctatacagtaagcccggagcgatcaagagagtgcctgagaaccatgttgtggatcctggggtcggatatgacttccggaggcgggatctggaatgggcggttaatattcgaaatcggtcactaataatgcgtatatttgaccaagccgtctcctgagcgctcaaatccgagaaacccgcaaagacggccaaattcaggggccacgtattggtcatattttagtcaatttagttatattgttatattccttatattaatagcccattttagggcccacttttcattttgtaaatcagaccccacgttcagttcctagcatcatacccggccctaggatcagatccatggcatggtcccaaggcgcactattagtcgctagtcgctcttaaactacgaccgtgtatattcataaggacgtaacaacgacagccctttcaaaaagggcatagccggcacaccgaggttcgttctccggttcgagtttgataatttcgggtagaggctgaggagctataggtgaagttacgatacgagaatatcggtgaggtattaaaaatttatgatatccagggaatttagagacaatcgatcgaaatatactattcggtataacaaattttattctattactttatatcatctagagcaggaccaattgtattaattactttaggctgccctatcacaatagcatggcgcagaacctaaattaacgctaaaagattgagcgagaaaggcctaaggactgatactatgaggcatagtagagagctgtctcggggccgtcttcgggatgaaaagaggggttatcaggtctctcttggttctcagcggcttttgataggcccgagagacagatacataggacttttgtcatgcgcagtgacgcgaagttaggtactctctttgtcattggctactaatatagttatagttttgcggctgtctacgggaagcacataggaacacgggccagagcggacggcgattccgccttctcgcccggtctatggcgcacttaacttttttttcatctactacctatttcagcttgggctccatataatttttccaggctattccaggtacttacaaccatagtcgtccgcttagacttaagcaacatgggattcggttctagtagggtgtgtgaccaccgacgcatttatattcaatcataagcttgattctccaacgcttcgatgcattccctcgggtgcctatttgtatatgctacgagaacgagtgttccagggggcagcagtccaatcatattaaattgtagcttagctggaaggatcagtgcggcagtcgcgcgacttgggtgagaatcccaaggtgagaatatctttactatgtaactttagctctcggggttccatggccaatcataaactcgaattaaacgccttccatcccaaacatggaattgttaccaccatgctgtactcagattacatcaggcctttttgatgaaaggtttagaatatctcctattagcacaaatatagttgtagttgagtccagacatatgtgatgagtatgaaactgtaagacggtctggataaaccaaagccaaataaacctaatcaatcaagtggttccccggcgggccgtgtcttatgacccactttccaacgcattttcattagctaatatagcatgtccataactaactaactagttagacctcgttctgaccgatcacagcattttagtaggctgtgagtattgagccttggctaagccttgctttgataggaaatttttggacgaataatagttgctcttcatgtcggtcttgatatttcgaatatctggcagaaggggctattttatgagccattcgtttgcgccgaggtaatcaagagcagtactcggatttttcccgctaatattttctatcttgcatcgacttcattttattgcgagatattttgatcatgatccattctctctccagccacagaactccgaaaatcagccaatatgagtaccgagatggacgaacttagcaaatctttcggtgatctttcgctagtacaaacactggaaatgcttgtggagaggacaatcaaacctgcccttgcggtgcaaaaagaaatcgaacggattcttccaaccgatccttatcttgccgggccgagaagcttcgcgaaaaatataacttatcgaaaatgggcttacaaaattttcaaaaactgctctgcggggttcgcacattcccctggatcttgcttcaaaatccaatacatgaccatttggaatacaaggagatggtggcaaaaaccaaaactctactctggctcgaagtacagttgcaaaggcttgaaataaagcttgaagacatcatcatcgtggacttatttccaatgttgaccgttaaatgggtgaaaagtcaccccgatgagcgcaaaaaagcaattgatgaaatttttgcgctcacacttgattttatttacacgttcaagccgccggttatcctttcgtgccaatgtgttaatttccagggggcaaatgtctggccgtcactgaagcatgaggcggctgaaaagctacgatcatcgatacgaggtgccgaaaacaaacgagtatcagagttctcacacaaagaacatgttacccatattgtacatggcttccacccttctgcaatgcgccgtatgccccgcacgatacctggccgagcgacaaggctcgagcgagaagtcttgctgggtcggataatctcttctttattccaaccgtactcagtatggcgaaataattacatgctcgggaaccgccagagtattaagaaacgggctatcaacgtacacctgcgccaaatgaagaatgaacttgaccagatccatgaagagggacttgctatgggcatatcccaggagccagacatctcccccacacttgctgagtggaaagacatcgataatgcgttggatgagatgtcgaatcaactgtcactcaccaaaatctatgtatttatgacttctgagagcgctatcatctagccaaccggactgatccagcacatagtaatgaatgtgctgcttctcagatgaacgtgcgaagaacattggattttcttttattttctttgctattaaaaatatattttttaaaaagaagatatagaaagtactctaagagtatattacatatactatattatatagctttatatataaatttcaaaatgagaaagaagataaggataatactatctactactataagctaatatctataataccagaaaaatataactattgtaatggggaaactgcgccaccattgcatatgcgctactgtcgaaggaatggcatatttattccctgattcctatccatcggctccttcgccggtccttgatatgatccttgttttattatttgccattgtctattgatacattcgagaatattagagggctaacagtggatatattgacactgatagagtagattgcgtaaaagactaagcaaaaagctatggatttcaaaagacgacagaggaaaggggatggcagagccatgatgatatgaatacaggccagcaatagtcaaaactaaatgcatatggcgagaagtcagcaaatgctgttagaggagtacagcggagttatcagcatactctgacagaaaaagcaaagaactatcaaggaagatgcagagaaacggagtgattcagcctgagcttcatcgactcgacgacatctggcatattcaaagctactccgatgcggtttccctcgtggatcacatcagcaaatagtattcctgcaacatctctgtcggcagagatcacgaagctgccagaatcgccatcctccaggaaatcgccatccacacgagtgataacatattcttcggtgatatgggttgccattgatatttcagcgccatcgatttcatatcgtcgccctttccactgacagacgcttttcgcaccattacagatgcccccagtcacctccgtggtacgacctttcttgaagtagtactcatcagtctgtagttcaccaaactgtgtgatagagctgttaggccggggaagaaaggttgcagatccaccagacaggagattagtcgacgtgggcctctgcttctgcgggatgtcaggtactatgttcgggcggaagtaccgttgctgggcttcggttgtaagctcgacgaatgcccaatcaaggaaccgtttgccatggaccaatagtcctgatgcaaatctgactttgccgagaacgtatggcatagacttcacaacattttgtgtctggatcagactagcgtcggcgacgtcgaggtcctggagccgctgccgagaggcttctctgggttcttctccggcgagaagccgcagctcaatggtctcttcgatctgagccttctgggatgcgaggctttctctgtggtgctgaatatccgcgagtgtacggtctcggtccatctgggcgatagactcgatgatggttgcattttggtcgtcaggggggaaattggcggaaattccagtgcgatcaacctcatcgcggaagggagtgtgtgctgttggtctcacaacatggtagttagttagaaacccaaaatgggcccggtcgtcatatcttagttcaacaaaaccgcccagagttccaacattctgatcaccgctgattccaattgaatcacccatcgccaccaaatctctgtcatcaaaccgatctctgaatgagatggaaggatcatgtttcaggagattaagggttcccggcagaaactccacgtcaacaagcagagctgacaccttcaatgaaagttgtccgatgatccgggcccggatttcgtaccagttggccatgagtagtggctggacgaaaatcacaattccaggtcgcgccgagcgaatgtcagggccaccgacgttgaacgggcaaatcatttgccagttctcccccactgcagaactcatcgtttccacaatactgtgcttgagcgtgtgaaaggcggaaaccactgcacttgttgaggcaatgggatacagatgaggtggagagaagtggtctccgttgagaacctcgacgtgcacattcgtaagggaattcttatgaagcagcttgacaaggctgtctttgataggccctaagcggatgaaggttgacccatcacccgacaccgtaacgcgcagcaaaaagaaatagctgcctgtaactcgtgctttcagggtgtggtggaaagattctgtgggtatccggtgttgactgaggattgcgtcgatctcaggccgaagatgtcgtgttggattttcttctgcagtgagaaattcggtcttcatttccgagttgtcatgtccgtggaatgtgttgctccgaaaggggtctgtgcgataaaggaactcctccagcctcatttcaccttcattgtcctctgactccctcagaagccgacgcctcttccgcgggcttagcgggcctgaagaggcgggacttggaaactcgcggggcttgtaagtggacattctgatctgaaagaaaacaaatggatgaactgaatatttctgctgatgaagttgggagaggaaaaaaagagaaaagagaaaagagttgagtgggcttccaaggtgaattctagcttttcggaccgctcctcagtagggcgtaggcatgcgtccacaataccgccagatgacatgtagacatgtgagctgtttacccgttcagatgtcggcaacctcccgacattgattatcgtaccttgccgtctcaaatttcaatgacttctgaaatccgccgaggacgagttgccaagtaaggcaaaagtcagcacggacgattgcatgcagaccataacaccaaaccaaaatagaatccacgccttagggtccttaatagtctcttttaattagaccaccgagaaagatttttgtcaccaccgtcccgatcctgcgctatgcgtagagatagcacctgtctcgggcccattcggcatcagaaaaaaagataatgccaccccggctgcaagagttatcccaccatgaataatgaataatacgtgccagagggctatcgtgagtgatgtgttcttgctaatcccgtatatcagacaacagcctagtactcgagccagtccatttattgaaacctataacgcggtttgggcattattttcttgcttgcggtactatatactcgttattgtcataaatgctggggagatagtaccttcgctgggcccgagaagaaaacatacagcagcgaatccgccaaaggtttgaggtgcagccagacatatgtagatgatgccctagacaattctgtgcaagtaaacgctgtcagcatatgaaatgatatgacacgaaggccggatgaaaactcacacggtggtaccgacgaatttgtttgatagaagtcgactcattagataaataaaggggtactcagaaaccagttgcccaacgtagaaaatggagcttgaccatgagtattgcgagctggtcatgttgagatcttcgatcaagccgaagatgccagtataactcagactctacttgttaagatattggaggaaaaagatgaagcatatctatgtttgcctattagctagtgtatggctggaatgaaggacgagaaccaattaccaaaggcagaatgactgtgttaatcttgcgtaaaacgggtttctcttcctcggcagtgtaggagccccggagctcgaccaattcaccggtcattcgatcggactccttatttgcgatatccttgctgaaattgtctattgggataaatacctgacaaaggcggttcagtgcagtgatttcaggtcgattggagaccaaccattcactaaatatatacaaagggatgttttatatcagagacaatccccagatttccccttagctataaaagaggatccttatctccaatcaattcggtaaaagatcaccgtgtggagttggtcgtcagtcccataaagacggcaatctgcctgtcaacttgccgatgtagttagatccgatgatccccgcaatgctcaatcatgtcacctcttttaggaatatttaatctcttgatctcttgaatgaacagtatatcgcaatatctcatatcgcatcaattcatcatggcacagaacctccccagctccgatatcaaaccgtggacccgcccggcacccaagggatacaaattcaccaatgcccatattgttgatgtcgcgtcaggcacaatcatagaaaaccagacacttatcgccacggatgggaaaattacctatctaggccaagaatcatccgcaccaacagaactcgagaccgtggattgtcaaggcaaatatcttagtctaggcctgttcgatgtatatatccatttatatgcaatcttaggtttcagtgacttatctaaagccttcgaaaatctaaataactagttataggcacccacgctaaacaatgcccatagacccagggcgggtatgcccggcttacgtaaggcccatgggcactgcccaccgtaccgcccgtgggcgatgtcgcagtctaaatacttcacttctcctgtagttctagtttgcttgatagagcttggttatacaagtatataatattaattattaatagtcggaagtaataggagttatataaggtataaaccgatttttaagaagcaattgcaaatattgctagtatattaaagcaaagataaatatgtagcatattatagtaaactaatataggcctctcagtatattcatgagcaatcatatccatattaattaaaggaaaaaaatagcagctttattgctgtttacacagaacttatagtcattcattctattaagttccccaattttttctactgtgtgatacttcgtaccattcggtgccataagtatcggtcctgcatgctgttcatgaacaaatgtttaagcagcaatatagtagatgtttatggcacgaatttagccgacagtgtagctagtagagtccagcatgctcactccttgagaacaagggactaggttgaaaatggtatagcttatgttcaaatcagctcgctagtcatcgttttctgcatttgatcgaacaaaaaatccaagagagtaggtgtttcagaacgaatgctacgatccaataacagtcaactgccgctgagctgtgaaagtctgtgcggtggtcgagcgacggcgggtgatccccactcaggttatcaccctgtctatagcgcactcacccttgtcacccccggtcgcgcgactataaagcggcagtcacctgtttctcacccaggcggcacccacccgacttttgaccgcacataagccacacgccggcgggnnnnnnnnnnnnnnnnnnnnnnnnnnnnnnnnnnnnnnnnnnnnnnnnnnnnnnnnnnnnnnnnnnnnnnnnnnnnnnnnnnnnnnnnnnnnnnnnnnnnnnnnnnnnnnnnnnnnnnnnnnnnnnnnnnnnncgccggtgagttagtagttgggtgggtgaccaccagcgaatcctcactgttgtatgtttttgtttttgtttgtttagtatagcaataaatagtatgttcatcttaggccccattgtggaagtctataataaccttctggaaatgaagcttaacgagacataggatatatgacgctatgaccatctaggggcagaggtcacctgacctgatgttgacgatgagatataagccgtcttaccattccaccaacggtagtctatagttctcagccattatatgtttccctccagtgctatatcagacacatacgaccatagggtgtggaaaatagggcttcccgtccgctcagccgtactcaagccacatgttatatacagctaatactcaattcgcccttagtatataagtgttagagcaggtgggcctgacaccaccttgctagaatgggtacgtatctaataagccaacgacttaccaaaaagaccactataacaacccagatggttgttatgtcaggtttctaatttatataccctttttaccccactcttggtgcaccaaaccaatcagacccaatactagatccaccttacacagaggggttctaacaatataataacaggaggcctactagtactataagtataaaaaggccttctaagtgttacgattgacatgtttgcttgtttatttgtttgctgtttgcattgtttgtaaagtagtcagctataataacccctgcctcccactttacaacttgcttcttctttctctctctatcttagttattttgaatagagtactctttcattattataagaagtataaatctttcagtcgcgactttctcggccatcgtgaaatcatccaggcgacctttcgaggctggcagatcctttgggtcaaggagctcggcacccttcttgatgatttcctagtacacagtttcgtgaagccgcgattggatatgatatatggtaaggcttcctcacacgttcacagactagcaatacatacttcaagcttcatgatcaaaggtacattacaaaattgatataaaacatccctttttgatttgagtccaatgagaatatccagatatcttccgtagatgctctattcgacaggcgcaggactctctaagatggcctaaatagccaccaacttagtaatgaaacgtctttaaagctatccagtgttcttgttgtagagtttaattatgtatcgttattgcgatcaactgggataagggggaaattaaaattagcccccctccaaacacgcaagtttgtttgaggaaccccggttggatttcctgtttgtgagttagcgaatatatctcccattccttcggggaaaagcatgttcagcgctatatgataatgtaaccgaacagcgtataattattgcgaaagagctgttttcatcacttggtgtttagagttgcggaaatcgatcggattatgctgactcgcccctgtctcatcgtttttatcaatggtcaataggaatcttatcatggccagggattgttaagaggacaacaggcaagacgactacggccgaggactgttttcggtaattcccccgtcattgatcacataaaccttcgagaatgcaactcaacgggttgggggatagaatatcccaaatgtacatttttttacaccaagattttatgcaattgtgtcttcgatgctagtcaggcttgctggtcgaggttaggctcattctcagtagcaatcactcttccttcccatgctcctcctacgagacttatttaggtcgacgaaatatatggcatctgcctcacccattctaatgggaaggcttctgcttgctcgacaagccagatcgccatacacttcctggtaatcctcagcccagagcctttctgtccaacgtagccagcgcttggtttgccctcgtctccgtcagtaatggcgcccactcgatacacagtccattcgatatctttcccatggctctgaaatgtattcccgatttcaacaaactctttataagctggtcgaccaaaagcccatactaaccccgtcaatgccgctcgtgcaacagagcgctgatcctgttctgcgtacacactcactgtcgtcatcgcaaacacccgcctcacaccacattcccgcatcacgcgtagcagtagggtgtagaaggaagggaacacaccacgatacgtatcgttccatgatttgtatccaggacccgcgggccctagggccgaaattatgacagcttggcctcgtactgcgccccgtaaggtctcttcatccgtgatactgccttcgattacctacttgccgcagcttgattagccgatgctttgaccatgagggagtaagcgtaattacctggactttgggtgcgagatcctgggatagtttcccggcattgcgcacgaacgctgtaacttgatgtccatttgtgatggccttgcgggtgatttgttccccacaagcaccagttgcacccaagatcaaaatcttcatgccgaagactaatacggtcgaagaggctcaagcgtatttgactttttgtaaattggaaattggcatgaaatgtaacataagtggccggaattggtaattgataagtgatggagcaatatattcaaggacgaggtaacgtgctcagacattcatatttatatcccaggcaattttggcggcagcgtagttaggtccactttacacctaccgaagacgggattaatagaagcacggccttaactccggtttggcccgtcttgtcagctacttgttattgttagtaacacccgtatggtattcttaattccttatcataagaactccgattgttacttctggacatacttgaacgggtctcctcttaaagccgccatagactctaatgctgacgtgtaccgggtttatcttaacgccgaattatgaccatcgatatatgtgataaaagaatttcattttttgccgctgtaaaccgcaccggaacttttatcatgtaggtagacatctccgcattcaccaagctgagcagagactggtttacgatttcaaaacgtcgttgagtaaggtatagaccaaggagaggtcaattaagtaattgacagcgctcaacgcccccttttttattttatttacggggctcggcgtatcttaccacagtggaaaggtaaatcagagagcagaaaaggatgtttagggttgctattattagggagaagatagtcaataagccaggggcttcggacagcttgggaagcaacttgcatccattctttctttgtcgggtgaatgcaaatgttcatattgtcacattctccggaacggaaggctcaagatgcgatcacccatatcagcgaacagcattttatgtgagtacctaacactgcaccgaattcattgcgatatgggctttcgcacgtcgtaaattagtaggcgagaatgaaaggttacggacggaaacacttgtggtacccttgatactctgcacgctcctgaaattcttaaggccgtcttaatgccgtcctagaaacccggccgtgacactccgtatccgaaacgatatgacgccgaaacttcctagacatgcggccagggcaagaagcaggcgctggctagctctttagatggttggggattgggttaggatagtgtcctttcccttgtcattgtggccttgtatgacaagtcgagacttttcgtaaggctttcacgacacagcctttacttctcgtaccatccgcgacttgaagatgcgctcgcctccgtggctcgtcgggtcgtacttctcaaagcgaaaaactccttggttaaagaggtcttcgatctccttggcgtccgaagcttcgaatggttcaccaggtgtcgtgatgactctattatttcttagcttgatcgccagttccaaatcgttcacctttttttcttgacaggaaggcggacgcggtcttgttcttggaacctctcgggcgtccacgtcggcggggctgaggggcctcgacgataggtggcggggggtcatgttgactgaccggctccgtggtatcttgcttaggcgcccggtggtagggtttcactgatatagacctgaaacttgtgggaccgttcaccatatccactataatgtcgtgtccctcaatcgaaacaatcttgcacggaccttgtcatccttcgttctccctccagataaatacttcactctgtaacgggagcgaaagaacctcggaggtagaggggccgtttcgggcatgaagcgcgtcgttaacccgtcgttcagcattggccttccgtagggcggtcatcgctttgttgatggcttcagctcattttgtagtcgaaggtgaaggcggtgattcggtcgtcatcctagggtaagcaccaaagactagcaaggtaggaaccaagccatctggtcccgctgtgttattaacagctttcattgccatttgaagtatagcctcatcacttgtgaatccactgagctctgctgacaggatttcccatgcacgcttgagtggtccatgagacttctcaaccttgccaatggaatggtgggtcaactgatacttattcttaaaacactctgcggcacataaaacggctcgcacaatagactttgtggaacggaaacatctgatacaggcgacaccaccaatcgctcgttccaggccaatagaattatagaaaggacctagatcgtacggtggctgcttgggatacgttcacagcacttgatttgctgagtaagagtccggggatgaatcagatgagcttgaggtcacggagcggagtcccgaagacgctagtactcaccattgcaaaccaccacgcttgaggaagcagagagcctcacccagctattcgaatacaagctgcctgactgggcgctgaggaacgataatcagcaatcgaggttggagtgaggatgacggagaacggggtctgatcttgccacaggaacaggctaggagctcgacgtggaggagcttacgcgggatgcgggaagagaggagatgtgggaggtggatggtacatgcatccacgcactctttgtagacctattgccttatggatatgtgttggagagtgtatcacgcgactgtgaccactccgccccaggacttcctgttagatagtttccatagtctctcgctcttccttttcctctccagagtccatcatcaatacagatgtattgtcatcatttctatcttccggcatcgtagctttctgtccctccgacaatatggcttctctactgtaccttgggttttgtaggttttatgttccgcttacatgtaataggtgctcccactcttcgagaaccaggaatgggatatagagttatgccaagcctgggtacccaccgtggcctgtttgggctttcttagaaggtactaagcctattttggaacgtcgatccggggaaccatctgcctgcacatgttgactggactacactcttccagcctcacttctcacttctcgcttctcacttctttgttcttcctttaaccttgtcttgccactttactcaaggtactcgatccgcaagctcttactttcttctcatttcttccttcagccttaactctccactttccttaagcactcgatctgcaaactcttactttcttcccttttctcaattgagtctccacttctttcacatcgagactttgaaaatgtcctctccaaccaagaagacgaagagcaaacgtggaagtctctccaatgtcttcgaaggacttgacatcaaacccgcctctccctatccacatccgccgtctactagaatcaaccttgccaagtccatccgccactacatgcaatcaactcttcgctttggacaaggaactgtttctcctcgcagtttaagtaaaatgcaatctcggtttacgatttgcatggacgaagcctacgattacaagattggcacacaagacttcgacccggacaccatttttcctgagattatcaccctcggcaatcaactctccgcccttttacaaaagcaactcacacccctgcaagaaagtgagttcgaaaatcacgtcctccattgccttgccactatagtgtacggatccaacatgatcgagcgcgctggaagcggttccaaaatcacactcaagctttgcatggcaatcttccgcggggaggaaataccagaggacattggagaaacggaggaagagttcttagagttaaaaaaagagcttctacgcaagaatatgccagcaaatgtctccgcagttttacgaagtcgccgtgaaatcgttcaacatgccaaggctgcctcatatatgattagtcaactctgcgtttatgataaagatctcagtgaagagatcatcctccagactcataaaattcttacgcacaaagtcgacgctgaaaacactccctgggaagaatacagtggtgtctatcgtacggatgaagtttctgcgggcctccatccgtttcctcgtcacagccttgtgccttacaaaatgaaagcaatggtccgcgaactccagtctgacatgagagaagtcattgctaaaggaacgattgaccctatcgccattgcttcgaaatatactcacatctttgtcaatattcatcctttcatcgacggcaatggacgtacgtgtcgtctgatcttgaactcgatactccttaagcttggcagttttcttgtatgcatcggcgagaaggaagaggaccgctccctttacatggaagtcgctagcaatggaggggcattggaggatatgtatggagatcttgatgacgaagagagaccagttatgcacagggagctaggaagttttgttatgtcacatgtcaaagagagtatgcgcaagctggtttctatgctttcgtgaagtctcttaggtctgacttcggaatatcaaaaatggagtttatttttctataagttgaggcttggccatctatggatgtagtgtatagactgcctatctcgtatatcaaggtatagagaggctaaaataaacacttgagattaggtggtactcccagagaattacacaccgcaatctgtcgtcagagataactaaagtgtctgaaagtaggttgtagcaccttgcccatatatccaccgttttgccgtcctaggaatatttgttattgtagtaattcaaggaggtgggtgtagcattgcctccttaccaaatcagcaaattgaaatcagaggagtatcttcgcggcctcgcgtattagagaatagacaagacgtgtccctaaagggctgaggcatgcaattacacactacgattctctttttccgaggaagaaagtcatactgtaaaaaaagtaggtgggtgacccgatataaatccgtcccactttgaaccttacagatatggtaagatgacctggcctctcgaatagttatccaagagaaagatctcgctgatttcataaagagctacccccgccgggggacgcatagatcatttataatcagagtaccggacgatatcaacgaacaaccagcgattgaattatcactactatatatgtctgtttgcaagaacgttctttgatcaaaacatggaagaacttgcctatacctaagaataaaccagcactacctttcctatcaagaatacaaagaagaaatcaagcctaatcgaggattctagctaagaagtgccgacttaagtaacaaaaatgaggttctttaatctggatgtataggagggtaataaattacatgggatacttaagtcatcagataaatagattttgacattcgctacgctttgacatccgatgggcgatcggaagccgggcaatacatattccggattgccaagagaggccaagaattagcggtcccattttgatattcgctcagctgacggccgatttatttgtcttggcaatgtttatctgatagatcatcccgtggtatccctagcataccactgaggagcactcgacgttcatatcacaatcaagcctgcggaatcatcgatcaatctatatgaagcgggcacgctcttgctccccagtccctctgcccccgaatcatagaaagatcgttcgtacggtcgctagccttacctctgatgctctccaggagcacgacgattctattcagcccctttctccattggctctatttgatatgtttcctcaacagatcgccagtctgtcggatgttccaatcatacctcctccttccacacgctcctcaacgatcgcgatcgagcagtccgtcccgaccgagtgatgtataatatcgcgccggctatcttcggcgcgcaaatattttcgtagataacgatatacctacaaatatctgttcttatgcagataagaaaatatttcgtgatttgatggacgatgctcatttgcaccagatggccgaaaagccgtggagcaaatccaagaaacttatcaagaaaccatcgggtgaagctgaatggacggaagccttacatacaggctgtgcgtaatcaaggcaagctattatatttctggtggaggaatcccgaattgaactattttagtgctaacttcttagcaagactggcgcgaagacctaaaaccaccagtatataaccctcaacctaccatcccacggaaacgaagtcagtcatatcgccttgtattcgaaatcgccgccagcgatagacactcttcgcatgcagctggatcagggcccccgttgccagctactcctgtgttcaaattgaaaaccccacgtccagatatatgcgttgggttgtcagatgagagcttggttaatgacctcgagcctaagaagggccgcagtgccgctagaagctttctactagacttgcaagataccactagtcttgtcagcgatccacacgtcacccctttgggccttcgtttcccatttttgatagtcgaggcaaaggctggttcgactggaggtaacctctaccaggcacagaaccaagctgcggtaggtggctcaacagctcttctgattttgcgaaacctttcggagctgaagtctgctcaaagtttggattgcaagagtcaaggaagttctcaggccagtattaggccaattgagagcttacccaacctcatatctcatatggtcttttctgttactacggagggcccaatttatgaactgtggcttcattttcagagactaagcgaagaaaacttctctatggtttgcatcggggcctggaggacgaccgtgaaagacgacactctgaatctcttacgctacctttgggcagttttgagatggggaaatggtgaactcagagatagcattgtgaatgctctcggggccttatagaatgagtacacaagtcagtagccaattcgcttttgtcaaccaatttgatgcatcatgacgataatatccccttttagcaattcaaaaattccatagcgaaagccatttgaatgaaaggtacatacgcgctcgaaatcagtttcacctccttactctcttccactctttcttgaacgcatgcctttggttacccctgacccacacagaccccaagtgttatgatcgcaagagggttttccttggatggtctgcagtgtacactctggcgtatggtgattctccattgcgtagcctgcgtagttcctgtggagtttaagtggtatgtgatatttgcaccgggatgtatgtgtaagcatgggcaaatcagaagggctgtagcgagtctacagggcgacaaaaccacaacaactaatcgaactgaagacatactagtatctcttttggggctgtgtgcagatgccaaggatcgaaacgtttcaggttcaacttgtaatccaatcatatcacgctctgtgtcactaggaggtcagtgcgggcgtcacgctatctagggtgattctcacccaccttggattcctgaaactcccgacatttgccagtcttccatttgccggagaaagtacgggggaaggagatctcgtcgccacttttcttcttcattggagaatccctgacctaaatcccccgagttgcataccatcggacccgtctcccgtggagcgaatggcagccaagcaggtgcgagcacaccaggcaacctattatgaccgaaatcttcggcaggtagcgcctgggcaatgcttcaacgcggcgattgaggatggtacaaacataatttttttgacgtttggtgacgacatggctgtatgtgaggagacggtgaattcaatcgcacgagcactccaagtcggccacgattctgatcgtgactggccgtcaaaacgtcggtaggaattgagtataaatgtgaattgctattaggatccaaagatctggaattttgtcttatatagattacggccagtagacttgcggcctctgtggttactcagctagatgggcacgaagtcaatggatcgaaagctttggcagacctgggcattttcttgctaagtgtctcaatcgtctcaaaatttttaattggccctccagtcataaagtccgaccctaaggagtacaccatcggctgggtatgcgcggtcagtacggaacttacaatggcgaaaagttttcttgacgaagagcaccaatgaccagatcctctttcgcccgcggacaataataactacaattgtgacaggatgggaaagcacacggatattgttgccgtctgatccaatggggaaaacggtgtatcttcagcagcaagtgtcgcgagaaacatgttgcataatttcctaactttacagtaggatcggcctgatagtgggcatcggttgtgctgcaccaagttcaaaacacgatgttcgcttgagtgctgcaaagcgaccctttgcgactgggcagcgggggcgatcagcggtgactctgtatttgtggcctttgttgaatatcctacgccaaaaaaaccaagcgatgtattcgcctttctgcacagtgaaacgaccatgatcgatctgagtagcgaccccgggttccgcagtcatctcccgcgcgaaagtgacgcaatcaggaatcaggagcaatttcgattcatgtgagtccagtaagccattctcagtatgcttagctctaggcagacgaccattggtctgtttctgcggcagagttttgagcagcacttctaaacccgataagttacctttttcttgcccagatgatcaagatgcaaccagcgaccccacttgagctatcttccggattgcggagagcccccaccccctcccacatcgccccgctcagattctgggtggcaaatatggaccccggcgccgacctcttaagtctaatcaaatcactcggcccgggtgataaccatctttacatgccaaaagggttggcggaaagcccaaggcaaagctaattaaaagggacgattgggcagagatcagcatcgtgtctcgcattgtctcaaattcgggtgcaaaacgatcgagtcaattacaaagctacagcaccttccgtgctttcctttcttcatccctatctggctttctgttgacacccataaagcaagaaggcacgatgtcaccgtcccagaatgcaacaggtgtttttgggcagctcgcacgtgtcttagcgccagacaagcctcttaacgtgctgatcacgggtacgtagacgtccgaagacaatcggtgtgcgataattcagccagccattagcacccggatgtaggattgtgatgtaattggacgtagagcatgaatgcgttcgaacttgaatgacgcaaacacctcttaccgaaatttctcatgtcgcgctcataactcatactcgaaaaaaggtatataaatacccgaatctaccccttaaatgaatcttcttctacactcctcgctggcaatctactaaaacttgactctttaaaaactacactatggcaaaggttgggttttcgtgaattctgaaagtttcttttcattctaatcaatgcttgtttttcttatagtcagtaattatcatgtttgaggacccggactcgtgggaaaatgagagagaaaatgttgataggtaggcggaaagtccaacttgggatttcttgtttgctatggtgcggctgacacgtacatcaagcattttggacaaatacactggaacctcaggatatccttccaccagatctttgccccctattattgtcggtgcagagtgagtttgtccttcgtgttttgaaagaactatctaacgtagacaatgcagactcggtgaagaggccgtcgaggagttgaggagcctgagtggagtactggtgcggtgtccggatgaagaggaagattagttattgacgctcacttggctgcaacatggcaggccgatctttgtactaagatcgaacaccagaaaataaagatgccaatatcccgcttacgtagctcagggagtatttttttatcttttttatttcaattaaagtgattagtcatgacatctttgtgcctttcgttttaggctaggaaaccagcggcttcggacggttcgcttgggaaatacattaatatgacgaacgaccacctactatggttgataaagacctgatgatacggccatcgtggcatcaatgagcgattgtactaagcacaaactgggatagctgtgaacgtgatgcctattgaacgatgtcagaaaactgatgctcacagatttgcaaaatgaaagatattttcccaaataaggggaggcttctctaaagttcaaggattctagaatgatagtcaaaggaatcacaaaagtagtggttcgtatctactttcagtctttatttctatcttatttatataccattttatagtttgttgtgtcaatcatatcatatctcacagtctttccattctatgccttgatagcattattaaataagcatcaaatcaccattccagctgtaagctgtggaaattaatatacccccatgatatcatcacaatttccagctctttatgctctctcaataagtgctcggatttcttcgagatcaaacggagcaagatctacctcatcgccgccctgatagagaaccgtcaagggcatctcatctggactatgctggggatgaataaatccactatccacaatgacaaaatcaacctcctccccacgattttcatccgcctcgaagaacatagacataaattgcgactctagctccatccaaggagcccagtaatgcacaaccaccgactttgggctcttctgaattgcttcgaaaacttcaccagggctaaaagaagaattgagggttagtcgtataaggagagagttgaggaaagaagctggcgtactcttgcaggatttggactggcattttgagagtattaggcttgggcttggggctttgaattaaatcagattgagtcttgtgatttgggagaggggcgtaaggcttaacttatagacagacctgggcggcccagcgtccgttcccagcttagattttcagctgagctaaacgaaagatctgatcttccttctctacgtcatcaatgaaaattgtaacttgctgagatatcgacgaatttgatttcgaataactctggagtacgaaagtgctacacgggcagaaggtttgatcagcagtgttgacgatcttggcaagaattccctaaccaccccctaactacctgattgggaggcctgcagcatctagaaggggcacagctgcatgtgaaccatgaattcattggacggacgacccacagtttgtttgtcctagcggcgttcggctctcccgaggagatagtgatcgttctacccgagcgaatccgctgagttctgcagtgcataacgtagatataaaccgcacatcattccaagatatccgcatttcagctgaaattctggtcgccactttctttcaactcgaaccagcaatttttccgaagagacttagctcttgactaccgcacaaacaacaacttcgtgttcaacgttacctagttcctactcacaatatctgttcaagtcacttataatccagactttagccaaaactttccgattaactagttcagggctatctcgttaaacccatcttcactaagaggaccccggaaattgcacttccgctttctttattttttaggcatgggcaaacccatactttgccgaaatgccctttacctcaaactatttagatttttgattctttggtcgcattcacttcgtgaaactccgccctcaaaaaattggctagtgtggaaagtgggcttaagacatttggaatatcgagaaaggatcgtcggttaggcaaactccgagtttacagagtttatatcctcggccaacccttcacctttaggacaaactaaaatactatactcattctattcacagaattgaatatataaataacatggcggtgtcgcactagtaacaagtccactcactagaggtctccatgtacagcatatacatctttcctcaaaccttgacggcgatggttaatgtatctgatagtcatgaagccgtttacgaggctacttccgcccagctacgctcttccctcaaccaacccgccttaagtggccctcaaaatgcccccgcactgcgtctaacgaaccctcgtctagcgcggctggctccttgatcacggttagccggtggcgcgcccagagctgatcgttaggcgtaggattcgggttttctaagctgtactcgtggagatcttcgtagactcccgccttaatccacgaagtgaggatttcgattgctttgtggaaggggttcggagcagtaggttgtgcggtagacgacccagccccaggtctcttcgcgcatgtcctggagcatgcgactggaggtgcggttgaagtcgatagaccttatggtcgcttcgtcgagtcgaggcggtctaaacatgatggataattgttcaagagatttgtattaggaagagagagatcgagggtgtatgtgtttgagaaagatctggcagaatgagttaacagagcagaaaacactctagccgctgatatctcagtccaagacgctatttactaccgtgagtggcgttccttggttccaacgccccccacccgaagcactttgatgaagccttcgatactaggtagccataggcgttcagcaccgagacgtctaccccagaaacatgctccttgttcgtggaaacctagataggatggtttggattgacttcggtatcgcaacaaccttcaccaactttggacctgaacagctggcctattgtcagcacgaaattgcgctcatagagggacttggggaattactggtaagggctccgttgctgcccatgttagaagtattcggcgtgttaactgacgaatgtagagagaggaccaagctgagggactcccaccgaatacaaaattatattgagggctttataggcattcagtggttccgacacttctttatggcagctatgcggttcttgtaacagagatagatcggccgttggggattgtctaatgtcattatgagtgatgcaggtcatgtaacacgccaggtacttctagtaaagtgctgtcctgacttgagcagtgcaatttttccaacccaactgtgctcaccagtttcctttgactccggcctctaatcatatttactcgtaaagggatcatcatgcccttgggacgattagtgggtctcgactctcaatccgttccttcccgccggtccgggccgaacctaccacataccttaagcttaaagtaggggatgagccccaaattgggttacaaacaatgtaaacactctaattatgtatataatcctgcttggtttgcaggttcgtgaacaccaagaccctgatttatgcaaaaaccgggtcaaactgggtccagactgctttttgacgagggcattcattggaatttccatcaaaaggggactgaaaatacggcatctgtcaaaataatccatgagaattgccagtggctaagatgctaagagaaatatgtaatcacaacatccgtcaaatagaatggttaatccctggaattgaaattgacgctgcctgtcataggatagcgttgacagagaggtatcaaatggcccgcatgatccttccccgtcgctctcaacaatttaaaaagccacaatcatgacttagtccactgtctgatgaatgcagagcacgtcgacagcaacctgttctggttacgtacatcccagaaaatagccgcagtgccgccaatgagcatgactattgtaatctgcttcgggaaaatgccacgactgtgcttcttagcagatttcgtcggctctgcatccatcgcaggtaatggaagatattccaaataaggccctcccctcgagaaactagcatacagcttagccttgatcctgtcactaacccatggaacgatgtgacgggccgcaaatttgagaacccaggtatcttgggcttcatagcgcgtaatctgaccggacagatcaacgaccgtttttgctcgaggcttctgaccagcgatatattgattgaaaacctcggtcaactgctgaagggatggcatggggttgtccttgagtaaaggcacgagaccgttggtcaaacgagcaataccttcataagccaggttaccacctaaaccaggattgattgtagcctgccgaattaagaaattagttaaatgattgaagttcggcgggagatcccaaaccttatgaactgagtcacccatcagaacgacccggttgtgactccactgtttgatgacaccttcctccaatggtaccattgtgcccttgactctagcatcccaaagatctttcacggtatactcagggcccactatagaactgccatatttcaggattgttgcctctgcgtcttcatccgtgaatcgcgggcagttgggggttctcgtgcatttggagtctttgacaaaaagaaaccaaaaaacaagcccaggcacaccagcagctgcaattgctgagtagttatcgtaatacacgttgtggaccatcgcatcaggtaggaactgcttcccagcatcgttccgggagacagcaaagatgcagtcgtactcgcttgtaaaggctatattccagagactgtcagttagaatgggtttgggagtagcaaaacagataggctggactaaccctcgttgatttcattagcaagagcctgatcagtcacgctgattttgtcggccatcagctttctcactttgctatgaattccgtccgcgccgatcaggatgtgaccgtggtgctgcgtgccatcttcggtggtgacgataaccgtctgtggggtttcttcatacccaacgacagcagttcgagcatggagcttcgatttgtcttgaacatggttgtacagcacttccaatgctttgcatcgctccatgaagacaatgggacgttgaagactatgccccacaaagtcatggtattagcacatttctttcatcggccacttccatcaatcaatacggcaagtagtaaactatatatagacctacatttcattgatgtcgactagaacaagtgagtcctcaaagcaatggccgtttccatcataatgttttcgaacttgcagaggtataacctgtttctcaatatcctcccatactcctagctgctctagaattcttatggtatgcggatggattccgatagaggcgcccagttgtgttgcaaagtctcctttttcaaaaagctcatattcgattccggcgcgctcaaaagctagggctaggccgagacccacaagactcccaccagctatgaggaccttgaactgatttttgtcttgatcgaacgatgccatgagtagagatgcttagatgcaggagtgacaaataattacggcggaatattttgtgaatttgagttgcatagttataaataatatgtaggttgtccggagtaaacaacccctttatatttcccattccgaagggttattgtgcaaaaggtggagaagaagattcaatgggcgcacctaagaggtccgtgcaatcgtctatactaaaagtagtattcggtaactacgaattctagattttaccaaggcgaattgtgtgcttggtgaaacagattgatcccgtaaacgtgggcaggtggggttgcaaaggcgatgaatattcacagcccgggtttccgaatatacatatgccggtgcaaggtaagggaatgcgccgctagtccggtacattatttgttgcgagttaaagacaatcctattgtgcactctggtcattggattctgcttctaggtacatcatataggcagttgttctcttgatttttccgggaacttccgaaactgacaagcagcgctaacgactagctccaattactcacgtatcatgtagtgacccgctccattaaaggggggccgttgcaaaatggtgcactgttgtagatgatctggaatttttgatcttagtctgttgttactaccttaactgatggttactctgtgcactcgtcactctatggcttagaccaaaatcacttatgatgcagctattcagatacctcattctcaccgttaggatgtatctagacacggccccacattccatcccaccggtctaacggctatactcaacttggaggaatgaggcttgacaaggttcgtcggaaattattcaggatgcacaagtaaagttaattgtcagctcactagttgactattgtctagaatgagttaacaatagaattagaatttattgatctgcatatgcagcctgacagctccgtagtgcgcaaaagtaccagaagtttggaagaaaccagtcacatataggctttctcttttttccagctcacaaaacatgccttgcccggttttgactcggattcgcgtcgtctggctcttgaaatgttgaccgaacccatatgcaaagaggccttcaacttttctaatagctaccatgtctgcctctgtcgagccaattttgacagcagaagagcggcacctgcagtcgctcatctacggtctaatcattagcacgggaatcctgtctatgatagtctgcagcttacgagtaaggacctactggctcgtcaaacgcgagaacctgtagagtacggcacatgagctgattttgcctctagctttacacaagagcattcgtcatcaaaaattttgggatggatgatatcgctgtctgcgtggcattggtatgtccaaccttccattacagctatacaacagccatgacgactaacagtcttaattcttaggttatcacgcaggcctttaatgggctgggagttgctgtggtatattacggagaaggaatacattttaacaaggtgtctgctgaaaatcgagcaatctggctcaaggtatgattcaaacaaatcattcgctcccaaacatgttaacctgggtaatagctttattatgtggcaatgtgcctgtacctctacgcctccttatctgtcaaagtcagcttgctgctatttctacgacggatcttcatcaaacgtgagtctttcattacacaaaatccaagctaggatgacctggtgctgactccacgtccaggctggatgaatgctctcactataggcatgattgtcttccaagtcttgttctcggtctcgggttcattcgttctagccttccaatgtgaccctgtaaggtaaaggaatcccctctcaggatatctgaaagacatactaacaagagtaggggtgcctatgacttaacagtcgcgaatccgaaatgctactcgcagtacaaactctttcagatcacattataccaggccgttcttatcttcgtttgcgatgtcatcatcctgattgcgccactggttattctatgcggactacagatgcccacacggaaaatcatcgctttgatggcaatcttcggatcaggttcgcacacaccccgttatatctgggccggtaaatgctaactctgactgcaggtataatcgcctgtatctcccccgttgttcgcttcagcacattggattatctgcgccatggcactacggatctgacctgtgagtgcacgctccttccaaatctggctctttactcgctgtatgtctgacgctgaccattacccacagacgactcggcatcatcactatactggatggccattgagttcaatttgggccttgtcgcaggctctctttcttctctaagggcattgtctgtttttcgccgattcggctcgagcgcaaactcgcgagacaagggatcgaccggcaataaatctcacgagcttctcaatatgaatggtagtgagcccagaaataccagggaaaggaagagagggttggggatggggacaacaatactgcaggatagtgttaacgagagccaggagcacattatatatgagccgaaaaatgaccacggacagcgagaggcaaggttttgatcttaattaaaaattcgacgcattttaaaatcaatatgctattttggatctttggtgcttgttaatatttcgtgacagatgaccttcctcttttctcgaccgtgccagagacggtttgggtatcaccttatagccgtatggctgttctagagcgtatacggagacagattgtgcaatatgatagatccaaatctacaaaacaatccagttaacattcactggcttacgcctgggcagatattccccatcttccaccaaggtcagcaaatggagattcccgattttgatcatcttctccggctgcgaagagtgcccactaccagcggccatcagcaacaaaccgtgccattgtccgggtcggtaccggagatgaatagcatagtacgtcccatgcactccgtagatctccgggatgagctgtttaatccagtaccggagatccccatgatacatgctcccttggggttggaagtgctcccgttcaacaatatgttcaggcaccgacagactcaaatcgacaaagcatgtcatgtgcttgatatcgccatactcgctatcggatgagaagaggatctctacctccggtaggaacaccgccccgtcgccgcgaacctcccacgtcgatacggacggatggtccgccatctccaagcgcggcacatacaggcgtcgcgcctcggagatccgggcccggaaggggagcatagtgccccggactgtgtcctgagttttcacatcgtcgacggacgggtaatccgccagaacggcggtgatgaagaagctagagcccagattgcgcgcgacctcctgcacgaaggcgagtgggtactggtcgaagacgaagcccggtttgttgggctggcgctgctccggcatggcagtggcggaggtataccattcggtcatgccgaggacggacatgatcgcctgcgcacggctgtggctacagtaacggctggtcgctaagaagaggatctgctcgcgcttgagctcgtggaggttgttcattcctgtgcggtggaggaggtcgagtacttcgtggtatcctgggtgaacaagtggcttccagcgttcgagaaggtggtctgctggggtagttagatcgttaagtaccctaatgagtgtgtccttgactcgtccggcgagggagacgagcgtgttgaaggcgacgagggccccgttgtcgcctatcgtgaggagttcgaggttcttgttgcagatccagatgtcagggcgcagacacacttcctgcagcgtccacagggagctgaaccagggcagggtggtcatgtccagtgagaacagccccgtggcccggatctggtcgtgcgctttccacggcgggatacgtatgggagactcgtccccacttgagaactggaggtccagatatacggaggacatccactggatagcgctgcgcatgccgtcccaggactccggggcggaatcggtattccaccaggcgatggcgtgtttagcgctcttgaagatggatgcctggcacgcaacctccatgtacatggcctgccgaagctcctcgtcaagctcctccccacagccctcctgcggaatgcacaccagatcaaaccagatatagggtgtatccgtgggaatctgcgccaggatatctggtagtcgctcgacatcaaacagtgagttccgagggatcagccacggcacgtgcggtttcatgtcaaccccaggctgatcacgctgccgccaccggccccaggtgtgactgatggctgtgtatgggatctcgaaatcgtattcgtcccacagcgaaaggacctccacggtcctccgctctttcacatcccacaagtaaagcgggaacccgcagatctctcccagccaggggcaggagtcgatactggagccggcgctgcagcgaggatccttcccaggtagatcgctgctccccagaacccgtctccctgcgcgccagaccggggaactctccgaccggtgagcgagataactccccccatctggggagtatggcacttgagctggctgttgggtgtggcttcgcggagagcaagcttcaatcgcaatggttagacaagcagcttcctgcgccatgtcccgccggaggctcaccaactcgttgccgcttcggtgtattacgaagttcccgaattcagcgttgaacagcgttgacatgcactggttgtaaacgcagttgaagcggaatttgtaccggatcccactggcctggtggatcgtctcgcgctctacatggttttgtgagtagaagtgagactcgtcgtcgccaaagaggtcgtcgtcattatcatcgtattctgcttctgcttcatccacaatacatattcgggaacatgttgcccaccatttccagagaatgtaaaacgatcgtacctgccccggggtaagatgttgtcgcagttcttcagcacgatcatcattaaaccccgtgatgaccgtgccgtcggggctttttatactgtcgactgcgccctgctccagagctagtcgatacatgatcgagaaacacctgctatacccgtctcccatgcccatgtcctcgccgtagaccacctgcatcaacgtggcgaggggatatcccttgtccctctcggggctgcgcacgggcacccagtcatcggggctcatgctgttatgctgaattttctgtctaatacaagtgtagataatagcaagacgctggtagtagtgtttattcgtaaagacgagcgacgaggtcagaagcggggttataatagaaaactaagcgaacccactgttctgctattggctgtgcttctgctagtacgagatcaaatttattgatgcagatggaacgaatataagaaagaaaaaaaaggctaattctcagttgcactcgagacatcactccagccaaaccaacgactaccggctcaccaagcgctccaagcaatccctcccctcctgatgccgcgcgtgatatgtcgcaataagactaactttcaccgtctcagccccatgtctcttctccccaaaaagaatcgccggccgatccgccagataatcagcgaccttagattccgtgttcgtgttccgtccaaacgacgtgtagcggacgatatgcatcgtcaggacaatgtatatctggtagcaggtccacgcgtactgaaccagcggcggcatccagagagtcgaggccagcaatcctagcggaaatagagcagcgaaaagcgctataatgctcagctggagaatctcccggggtcggttccggactgggtggccgtagtgtcggaagaactgctgcacgagggctgggagacctgtgaatagcatgaggtcgccgccctgagattggggggactgcaggacgaaatcacgaggtggttcagcttcggtggtcggcgtggttgatggcgatgaggtggaggatgagacaggggtgaggggctcgtggtcgagggcgaagaaggcgctcaggaggcggagcagcagcggggctagccaaatgagacaccagagtgatcggccgatggcgtagacgacggcaaagagaatgatgccggagagctccgcgattaagatgctgaggtaaacgtgccagcctggtcggccgcagttctcgcgcacaaaagccatctgcgaggctttatcttctgccgttgctggagtgaagatgaggtggtagacggcgactttcgctcgtaaggggatgcggccattgtcggtgggcgggaggatacccttctcgatggcagcgtccgtggctggaggggatagtcctgccagtgatccaggtttttcggcgggtataggcatgtaatgaagagctcgcgcccacatgcagttacgagctgcgcggggctcggaagtagctgtaccgcaaatggtgtaggtccagtctgtttgctcaaagaacgaagtgcccagcatgtggccttcgtgggcgcccttcaagagacctcgggcgttggcgatatcgaaggtgctcagagcggctttgtgcaaaggaccccccatgggcatcagaagagccagggttgggatggatcgaagtgtgatgtgggagaatgatcgctggggccataataaggacgaaaaccagatttcggtggctgcctctgctccgatataaccaagcaccgcaccaaaagcgccaagaaccccaccttggtcggacatatcgccaagcgagatgatttctggtagcaaagggttgtggtcagatagaactcacttcttttgtccagatggccggacctgtcatggcaatggacagatctgatgacatggccgagttttgagttggccggagacctgctgagctggctagttgagtcggtcagcgttgtcacgctgatctaggcttacatgatattcagccgcaagatggggttgtccaaaaacccagctggccaagggttattccattatggctatattgttttggaagtgttcatgtggaatccgtcttccgatttatcatgtcccttgaatcggggaatgacagtaaatcagtcaacatcatccatgggtgccggtttggttcgggtccaaaagctttccaagacgggattaacactacctagcaggaaggccacttcatagcttaagtcccaagcgagctgggcgaattgatacctgtcagaatcctatgccttcgaaccagattatcaactattcctaatattgcagggtctccagagtaggatgactaagcagtcatgtgataactataaaagcactccggaggcatagatagtaacgcagacacctttccaccttttcattctcagtaccttatggtgttctactctctagcaccctaatactcccagtgacgactctactctcacacctgttttgcacgcagggctgtcctgtccccgtgacagggtcccctctttactatactagggccaaaggtcacctgacccaatggtgacaataagaaataaaccgtcttgccatcccaccacggctatagttcataatcctcagttgcactatcttcccctctgttgccaatcaggtacatacgaccatagggtgtggaaaacagggcttcccgtccgctcagccgtacttaagccacacgccggtgagttagtagttgggtgggtgaccaccagcgaatcctcactgttgtatgttttttttttttttatttgttggcatatgtgtgaagtacagcaatagcatgctcatcttgggtcctgctgtggccctctgtacggagttatctttaagaaatcacgtattttaccaccgcggggtatcaatgactaaaagccgagctcttgtaatatgggtgtagacaagaaatgaagatccgatgtctttctgtatgataaatctcatttacaaagtaattaatgctgtctttaaaagcaacaagcattgttacatagtggtcacatatttcctcggaagaaacgaatttattggtccatttctagtggcaagtggggctattgcctcaatcctcaggcgcctaccttccgttttcgggtagcggccgttcgaagtacaacgactgccaatatgatattttggtttccatatcttttgtgagagaaatgagaggggagaagagtgtgcgcatgaaaataatttactcatcgttgattgggggataaaaagagtgtggagaagaggaaacgaaatgaagaggtaaagccacgatgttttgggaaaggagaaaaccaaaaagatgacagttaacgcggaaaatgaataatggagatggaattgaagtgaaagggaagaaaagcgaagaaaggaatagcctcaaagatcatgagaattggatttggggggggggaaagaggtgggaacaacttcaaatcctgttgaggaatgaagaggaaggtcacggggaaagcgcaagaaacttggaaatagcttcaaccgtgagccataggattgggaattgatgtgggagttacctcagaaaggcagggatagcctcaagaatgggaaatagacacaattacatcggaactctgaatagcttcatgattacccaactgagaagaacaagattcagccaatcaaataactagaaagattcaaaaaggctctgttatgatgaacaggccgggcagttatttcaccccaagccccacgtagctcagtggaatatgaccgttggtgcagtctctgggcccaaggctgtaccttccgttgaccgccagaacctgtgagagcgtgcgttcgagccagggcgagttctcaaagaaaaaaggaatcctaacaggtgttggcccgcctggtcccttcgtttggggtaggaccgagtcgagattcgctaacaacgcacgtgtatatatcccgttaagcggttggtttagacgagtagatctgcctatcacttgtgacacaaaattggggaaggccaccattttttttctcttttttaaggaagcaaatgaagttgtattgattctctcgcgaacccacagacccgcttccccggattttgtaatctccccccgtgtaccaacgaatcgtgccactacgacaatgggactttttctctaaaccatctcttactaataataagctgttccaacctggttccaagacctttggccgctctgccccttcgcagtacgtgtgaacatctaccttcatccatgttagcccgcgactttggtaacccctgtcgatcccctgccactacccttccgttttcgggtagcggccgttcgaagtacaacgactgccaatatgatattttggtttccatatcttttgtgagagaaatgagaggggagaagagtgtgcgcatgaaaataatttactcatcgttgattgggggataaaaagagtgtggagaagaggaaacgaaatgaagaggtaaagccacgatgttttgggaaaggagaaaaccaaaaagatgacagttaacgcggaaaatgaataatggagatggaattgaagtgaaagggaagaaaagcgaagaaaggaatagcctcaaagatcatgagaattggatttggggggggggaaagaggtgggaacaacttcaaatcctgttgaggaatgaagaggaaggtcacggggaaagcgcaagaaacttggaaatagcttcaaccgtgagccataggattgggaattgatgtgggagttacctcagaaaggcagggatagcctcaagaatgggaaatagacacaattacatcggaactctgaatagcttcatgattacccaactgagaagaacaagattcagccaatcaaataactagaaagattcaaaaaggctctgttatgatgaacaggccgggcagttatttcaccccaagccccacttagctcagtggaatatgaccgttggtgcagtctctaggcccaaggctgtaccttccgttgaccgccagaacttgagagagcgtgcgttcgagccagggcgagttctcaaagaacaaaggaatcctaacaggtgttggcccgcctggtcccttcgtttggggtaggaccgagtcgagattcgctaacaacgcacgtgtatatatcccgttaagcggttggtttggacgagtagatctgcctatcactcgtgacacaaaattggggaaggccaccattttttttcttttttagagaagaaaatgaagttgtattgattctatcgtaaacccacagacccgcttccccagatttaaattcccccactgcacaaagtttccgaattattatgcttaacaagagcctcaatgtcctcgtttatcttattatagccaaaagccagtatatatatctttctcttcaatcccaatgacaaccaagtcccttccggtaccataaccgaggacaagagtggctttgactttaggtatcttttatacggaccttgcatacaaaatgtacttgcttccttgtccgaaatacctgttttaaaaaaagtaccagttaaaagccagcttaatagaaaatattcaccttgatttgttctggatgaccaacatttcctttgttgactgtgtatttattgtattgttgaaatgagtatacatacccaaggcagaccgatttgggaaggaacgctgtagagagcacctggcccacgtgaattgtgctctctctttcctcttcctcttcctctctccctgatcatctttgtcttttgtccccagcttcaaatcaacgagacatcagatctgccctctcgttgcaaaataactctcctgtcccctgtacattttccgtcctcattgaggttcgaattgtatctcggctgtttccctcctgtctcccaagcatcaccatcccgacttacgtcgccttttacggcctcagtgaggatcgttatctcattttcggttgataacagtaaggtctcttggcacgtttatcctcactgtttggtttactgaatattgaaatagaaatgacatccgctcccaacgtcccggatttctttcgccgtcctcttggagctgattagcccaaggagttgcataaacaactcaaaaaaaaccgccattgcatgattagcattagagaaaacaacgaatacatccctgccgcattgagaattcgctttaactcccagcaaccatggctagattttcaaattgacaaggcgcacgtcgttttccccgccacatggacagacatgaagttggtcctcaagggtacctccattcagtacgataccttcattcatacacgccagcagtctgcaatagaagggaagaaagattatcaagcgtgcttttttgagttaagcccgtctgctagtcctgtattcgctggtcctttctgggagttaaaccacgaccaatcagtgcgatagagcaaactccaggacattgagtggcccggaaagaaagtttatatctcgattgcatttccaaacaactgctttaatgaattctagaatatacaggcctacatggccaagctggtagagcttgtgcgcagaaatcttcacacagacggcaaactacgttcgttttggtacgctgaacagaaccctcttccagaaggggaaaaagcaccacgcaggcccaagatgccctagctcttcgataatgatagccaataccatgcgtgggacacctctgtcgacttctacctggatgatcaggaccgccgttcgcgactactggaagccgcaatcgtagaacaacatattgagtgatctatctacaatgatgttttctgtaagggcaagactcacgatgtcatattcgagcgtgttgggccaagggagattcactggaaactccatgtctggatgtataccaatcaaaaagctagccccacctgaagccacccgagtggagtataaggtcgacatctcaagtccgattcatcgaaaaaaccaaaagctggtcactggcgacggactttgcatacgctctagccgtgcagacttcgctatcttgactcgagcgcacttcgaccctgctttagacggccagaccaggaagattatggctactgtcacaataaatttgaatggagtgggtcggcaaggagaccgtggaaaggcctcctcctggtatggactgtaagctcctgagccctcggttatatgttcttgatgaatttgaggccatcgagtagtcatctgcgcgattaattggtccgtctcttgtgtcttctggatctcggaagtcggttcgggacgatctatcccaaaacgttccaaattatcttcacggcgaagggattcctctcgagtcacttgtttttcagattcttctatatgatgggatggcggaccattcgcaaggtgtagcttacacctcaggccaaaggggtggcacgacatagtaggttcggcccgggccgacgggaaagagaatgcgcatctagacccactaatctgaaattttggtaccgccttccagattgggtgtgaccatggactttgccatgatttctgccttcttctggcttacatagtgaataaatatccaatttgatcagaaaaaaaaaacacatattctccctggttcagatgtttcgaagtgcacgctgactctctgggcctgtgtaaggatgggctttcaatgcgtttcaccggtcttcaaagtgagcgagtagtattccagtccttccagtccacgagtactcccattcattattctgagcactaaaggtgaagtgctcgatttgctagactgaagagagtctagcgatggacttatagcgctagatagaacttggaatattgtgcttgcgaataccaagccacatccagccggtactctgtgatataccccaggcattagaagtaccttgatttaaattcttcttcggtaccagcagccgtaacggcattactgttcagctcaggagtaatgacccatcttctagagtagcaagcagtagtaaccagggtgaaaggggcacctggctcaaggatacctttcagagtaataatactcagacccctcgaccgtttactactatctaggagaaggtggtagtttgggaatccgtggcagaagatcagaagcaggagtgacgcttcggttcttttagctaactccgatgctcgcttcgcctcgtaaaggaatcgctcgatcatatcacttgaacgaacgacaattatatcggtcaagtgattctggtatggcatctcaccatcaaggcagattctgcgcaccttgtacaggttgctatgtaggtagggagcgtatctctgcaccggcttctctgggacggctgctgtgagccacgtctgtccctagcggttgcctttcagaagacggttgaatgcatagaaatcggagataaaccacccgtctttgcatgggtttacgctgcccatggatggatgggtagcggcgaggacgattgtatccttgtaaatacaaggcaatgttgatgatgtgaattttgaaggcagctttcctgggattgtatgtgatctccctcgaccaaaggctctttctgcgccgaagacgccattatttagtgatatgaagttcgtaactcagagaagacggactatatatttgggttgggcgggaggtggtggttaaggtagggccataaggccaatggacaagagtttcgttgatggttacagttttatttgccatcatcttgatattgttgttgatttgaaaaacatcggggtggggagcaatgccgaacaccagaggagaagtttgatagacggagacgaatagagagcaggatacgctggttctttgaccgatcattgttgttgttgagtgggatatgaggcaacattcgaagttagggagggtataatgatgaaatataggattgaaaagtgagagaccaggtaactgtgaaagagaagtaaaaaattgaatgaaaagtgaaagaaaagtaaaagagaagtgaaggggagacttaagagcaacctgcccactgatgacctgaaatgaccagcatcggatctcgagactcaagtagcttagagctataacggcgaagggaaagagaaagaaccatgattgagctaggcagatgtgaggaggagggagaccgtgtgcgagtagaagtttgcaggtagaacatacacttgataaaggcgacgtctcggaataggtcgaccgagagactgtggaaagagccttcgattccttatcgaagttttcagtttccgttgttctcactattatcaaaatgtaataatgagtatgttcctgtgctcattccaaaagctggttgcatatctcgccggaatcttgagggtgagcgtatcggtccggcatttccttcgcgacaccactgccgagatatgctgaaaacttgcattcgggccgatgatagcagtttaaggttaaatacccggatcacgtcacctgattctgactgtcaggactcatatcttcctttctctccttcttctcccctatacacacttagctagcagaatatagttcattgtattactcgctcttctcctagcctcacagcaaatagtaagacaccgttgcctttttgagtaacacctgaattgccgacgctagagaacgaagcgaggtacccactgccatctcaagtagtagttaaggcaagagtggattactaaatttctactagcagagatcgccaatcatttcaaagtcgcgattggccgcttcaccccctccccgtatgcatcttccaatgaaaagatggctatgactagtgctctagcaggcaactccttgtcatttagttcagtacctgggggaaatgtggaagtggaaataatgagtagttactttgtgtaccttagataagcatcgatttaaaatgagtcgtaaattccccatggggaaagagttctccagtgattccactaccaatgcttgatcgcgactgagatgcgcacgcggtcgaaacgaaccttcgggttcgatgtcggggttctcaaagtggatccgaagtgactaatacatgtagttagccccgattatatttgattggtcgaaggagcttccccttttactctagttgtggcttagctcgacatgttaacctataaaacactttcggggctgagacatcaagtgcatcctcagggggctgacatggggaccgggtgctaaagatcgtatgagctagtatcagagtaatcttaaatcttcctcctttcaattaaaacccagtcattccctcactctccacacctccacattcttcacaaaaatttcaaacccatcactccatactcctcaccaaaatgacattcctcaagacccttcttctggcggcgaccctgtcagtcgcttcaaccgccgaaaccacctgcccagcaggctggctcctaaacacctggaccgtcacaagatgctgctcaggcaccatggtcgtcgacgagcaaggcgcatactgctgcgtcactgacatgagagcttacaaagaagcactcaccaacacagccttgctctacgagacggccaccacgaccagcgacaccaactggtccacggtagaaaattcttgcgtggcggaggtccgcttcacggctaccgactactcggcccaggtctcgtcggcggcgagcaaggctgaggctactactaccaatgattcaacgagcgaggtaacctcaacgagcactacggcttctggtgctagctctggtgcaggatcgcagacttcgacctcgattccgactgcgacttcgactgcgacttcaggttcggcttctacttcaactccgacttccacttcgactacgacttcgacctcgaacgcggctatgccacttgttaccggtgaagggcttgtgctcggtggtgcggcattcgctgctgcccttttcatgctgtgatgaaatgtgatttttttgtgattgaggcccccattttagtttcagtactatatatgtacgatttcgaactgaacttaatagtacacacgagactagattgcatgcacgttgatcgtatttactgtaatgacctcaggccgccagtcgggttcctcaggcacactactcagccgactatatacgcctagagtagtgcccaacagtattgaaatagtagaaaatgaattcaaaagccgtcagatctctccgtagcatagcagatattgcttgattcaatttccatacctgtagataaccccagttgtcctcaattgttgaatttatactccgtactccgcaataaagacagaaatactgacaaaaacaccgaattcctttggttggaaatgactgaatgcagccagaattgaacagcagtctcgactagcttcatgcttagtgacgtatgaatccttccactcaatagaccctattagtgcctttttacagcccatatctgatctcatttttcaagttatacgccttcgtgcattctgagtgcctttttgcaaagtactgtttcctaatcctgagctgaatctgatatacactggtttctattcattacgtttcaatgaactctaggactgttggataccttatgtatcttcctacatatacctatgaagttcagcaatataataaaatatcattgatcttactatacctgtatcaaagctacggagtgggtccagggagtcagggactcgggtgatcgacaacatacgatggccctacaacgcatggacccgtgcggctagccttagaaatgtggaatataggaagtaatccagttattgcttgtgattactatcctgctgcctagagatgacttgaaaataaattagtggcgccccctgaaccctctggtaccacacagagctttaaacccctgctagttctatcaaagaggtgcttccttacctaactccgcctctcatcctcattgctacacccagaccgatctatttacccctttaagatgcatcgtcttcgcgactccctgttaagcccctcgccaaaaggcttccccgacatcggcgagtcagatagcatctcttatgatcggctgaatgtgcggaaaagcctcgctcggggcgaaacccaatagatgcgcggaacagcccggttcaatcgaacctggattgtcacctccagatactgccaagttggagatggggtggattccctcgaactctacgttcgtcatatctggtatatgtactaccagctcggtctatatacgtcgcatgagacccccgaacacgaccgtctagtcctcgatatcctccggattcaaggaaagggaccgttgaccaggcctggaaagggggtctacggaatcgacatcgcccggatgaccgaaggcacgctgtgaaatgacctaccgctcttagtcggtgatatgactgactcttggatcaacgactgcggagcaatgtcgggcatccatctcctcaacttttcttctttcttggccaagttggcgttcacctgcgtctgcaaggatagaatgtgccaggtcgctctcgtcctatttcggcgcacgtttgaggagagacaggtgcttcgcagttctggtgatcctggtgatcctgatgatgaggatccacaccggagcatggattcactggagattaggcatttgttgccatctgccactgcgtggctccgggaggcagattgcaatatcctgcaactctcggaggtctcgtggaatgattgtcccagcgcgattggtaagggtggccgctgttttatcgagtcgaagctcgggaagcggtcgccgactggattcacgccatggagatggttgttctgactcaagcgaccccgcgaaattcaggaggcggcaaaagaggccaacgagaaaactctggaggaatctgctaccgatgccatccacgctatggtaagggtcgcggagaaacgaaactctgacattctgagagtttatcaaactgccggggatctcatctacaaggatgaaaatttcctgccattgaaaaagattgtggaggggaaatacccctggcgcgaggaaaccgaagacggggaagagaccgaagatcacgagcggggagaagacagcggggagagcaaaatgccggaagtgagtgaaaaggaagaggagaacgcaaatggcaattaaatgacactctctgcctctttctttgtgtttttagccctaccccgaccttgtgaagttggatcaaccttctcggctattcatattgaaactaaacagccgatagaaaggaacctggtagtctgtgagcgcagcgagctaccattgggacagctgttttatgttcagccaacaactgcgcatcgattaagatgagttccagaataattggagtgtacaatgaacgtgacttacgaggagattgaggtcgtaagcaagtgggagaaccgaaccctgtcgtcactattcaagtccattcacacaatcaccccaacccgcgggccgtatcaacaccggaattccaaagtctatgggaatttaataagaaaggagttgatgtgtctgagctttcgagattcgtccactatgaactagaccgcgagcttcgatagctcgaagaaaaagaggatagtggtagataggtgcggctgaaattgtgagtcatgtgatcatgtttgtgtagaattctgccttttcctctctactatttgtctcctattctcgtcataatcaacacagttatactgctctcgttctcctagatttacgttctcatagactcttcggccccccatccagacccacttgagcggcacaatccagatcacgtgcccgaagatcatccaaccccacacactttcttctactacactcatctctcgcatcacccaatagccaactataacccgattccttcctatcaacacacacaaaaatgcttcgacgcccacgtgaagcccagcctgatgccataacctccgaaatcggagcgatccttgcacccctggatatctttccatggggaccgcttgcaatgaactaccttggcgttccgattgtactaggagtaagttgccttatcactggtctgcgattcaaccatccgctaatgcactcttgtagacagctatgatcgccgtacacgataaggactatcagacagcatgccagaagctacaagagtccgaattccataaaacagtccctgaccgcagacctgcccccgagctactggctcgactcccgaatccagataaggtcatgagaaaggttaataaaaaatacgaacgtctggataaatcaaccactatcttcgactatccagccaaccaccacctagccgtgggtctcaagttgattgtggtcccgaattcttttgcaaatcttcccatacaggatgcggctagcgacctccctacaaaaaaatacgaagtctatggcaatatatttcacccgcttgaagaggcgttgattgagagtatggctaaaggtgttctcattgatgagaatgaccaaaatgctcctacttcgatctggggagatacattgagtacttggattgcgatgatggtgtcataccttgagataaataatgatattcttgatagctgccccgataagcgagccgtggaatggttcagtgggcgctatggtcgaatacacgaggaaaagttcggcccctgggacagacgtgtctcaaagcgactgggctctgggagagaaattcccgtggatatgaggggcaacctgctggctgaatgagatatacacgattagactccttatctataatacgcggtgggtaaaaataattcatttatatcgatatacttttgaaagctttcaaaaaattgaccaatgaccttattttgtcgatctactaaattactcccatgatgcatacaggctaattaaactacatggagggcggatattcaggtagcactgatattcgccgcaaaagaaacccccaagtgcagcctcaaaatcctatggctagcaatatcgctggagtgtgccgtcaggattatagcgggcgaaaacaacggagacgaagcatcatctagacaaaggaattgtgttttattagtcacttgtccgaggagaacaaaatgctagaatcgcaccaatttccaaagatagcctggcatttgataacctcttccaggtcacttcgcagtttgggctttctctgcaaaaatgttgccaacgcatcttgaagttcctgatcacggtcgaagtcgagctcaggtttcccagggatggcgtagctcaggaggttctccacatcttgttgatcaactgcctgtttagcacctcggcgttggtattgtgagagaatcttctcccggatgatccattcagcgctgaaaatcttaaccgggtatccgttgatttcctgtgtcactcgggtcgcggactgaaggtcgtactgaggtctgttgggccagctagcataatcaaatatctcgagctctataagacgtaccgcgtctccaggcaattggagtttgtatcccgggatagtatgcccaaactgattgaccgggccaaagtcagaggggaaagatttcaagagtatgccggtaaggaggtctgcggtgatggatcggtggtcgacctgaatcaccatatcgatatcctccgtggctctctgcggatcaggtgccatgaggcacacgccagcaccacccatgatagcatagtcaatctctagcgagtctagccgttgcgcaacagttgaggcgacatactctagctgtatctgcagaaggatgggcatgtcgaaagttttctctaatgttatagtggtcagatttcttgtcccttttatgtccagagtaactgctggacaaaggttgtatgagaaaagaaaccgatttaatgagatacgaacagagaggaagagcaggagagcaaacccggtggacggcaggcagaaaggctgccccgcactcgatcagtaccttagagcctcctagtctaggcaggtcatcaggtgtagctatatgcactttagacacatgtacttaaggtattcgcgtggcagggcctatgttagagacttcttgtatcgataattcttatgtaatgcgagccaaagaccatttatctcgcaatctcccctattaccagtcaatccctcgatccgtgggttaccagattaaccgtgaaacatgcatgcccagctgtatctgtcactttggatgtctttttaatgtctgattcccttcttggccctatcaattaatctggattaagctaagaccccaaagaaagatgaaggttttcttccgatccacttcgacccgctaagatcccggcgctacctggtcaattggtccattaattcttcttgcagtaaacacgactcttatcggcggttctgtatgctgtcccgcgagtggctccgtgcttgctgcatcccgtaacttggttggattgaataccgggtggacgttaatcgacggtggtagccccagcttgtaaaaagcagttctaatatttagatctcgtatgtgacgatgaacttgacctattgtatagtagcaatattagtacattaataaattgcaagcatggtacatataatacatacctcaagttatctacatcctggcccctaaagctcacatcaagggttagccggctccaaggggggttagaaagcaggatgcggcaaccacatcacttccaaagtcgggccatggcattaatctgccattaaatgccaccatctggattgtactgccaatttcgtgggttcaccctacttggagaggtggcaaggttcgagcagcatttctcgggctgctagagggattatgcgaggcgttccttttccaaatcggttctgttggtcaatggacgtgatagtctagtgagattaaaatgttagtatcacgcgaatcccttcggactgtagctcacaatatttgaggtgatggaaggtacatggggaagaatgggatgatagcgaagattctcaccccatgctcagaaattcacaggatgttgagatagcccatgccgagtgtgatttctcacttgatgtacctttgaagatatggcggtggttttctagagaagaatggagacaggaagagccctatccgccttagccaggaagtccgcgtctgtgatagccaggtctatccaatgaaggaagagtgtatatactcaaaataaccaagatagcaagagagaagaagaagcaagtgaagaagtaagcagtgtcttgcttatataaccggcaaagcttgcaagccccaaacctctcatttagctacctagtaagcaaaccatctatgaaggcaaacaaccaaggttttcttccgatccacttcggttcgcttagaggaactatgtcgatccgggcgctactccatctgtcaaggtggggacaagcggttggaggggatctgagcagagaatgagtaggatttgcctcattaacgctgtcataatcaaaagtttaagttaatccgtgaactaagacgattggattgccgtagaaggggcgcggtactaaaaaggaatcaagacatgagggtcaaggcagacacgcaggccaatcaccaactatactcggtcaacaaattaattagagttcgctctagtatcgggatgtgataaggttaaaattgaaagaaagaggcctgaagattcagcttagctcacattaaacttgaccatgtccctacaccctgactagttatacgacttatgggaagcaggttttcataagaagattagacttggaaataggttagacattgtatctagttttgaaaatatcctttttttttctgaaaagaatagctacaaacactcaagtgtcagtatcactgactttagagatatataattcccgtacgaacattgaagtaaaagagaagcggtgtatacaattattgtgctccatgatcattggacccatctccttgaatattcagctgaatgttttgttatggttcagcggagaaatggctggctggatggtttcccgcaattagagaaatggctggctgtactccgtattctctcacaattatcacgtgtttcatatcctcccacctacgtcgtcgtatattgcataatatttgtgctttttattggctataggccacagctatctatttgcacgagtaatgagcagcttgtttttttatcactagccggtttgaagcgcacgtccttccgcggaggagtgggaacccacatccttcgattcttgcccaacttcaagactgtatttatagtgatgacccggctagcccttattattgcgttgtctcagcgatccttgcggatccttgcggcaatccctggactggtggaagacctaccactggatactagcatggggatctaatttatctcctgcttcctatggactgatctgcacggggcgggaaaaatcatccgactaagcccgcgatccacctttccatgtacggatgtgtgtacatgaacgaatacaaagcgccccacaccgtgatgatccatctggtggggggtttcgaccaagcggagttggcttcgaccgatgggagctgagttttctcggccaggattcatcatcgtctattgcttggcttctcccgagaagccgttggttctgcgcatgcgaactagcccataatgtgacctatcagactgcgagaatcaatgagggaattttcagctgcatgctcgaaactagatcaacgtcatacctagacaaagaaaacatcttggctgctagcaagtttcagccacgctccgtgttttcctgttgtccgtgcttgaccgggtgggatatataaactgcgtcaatatccggtgttacatactattcaaataacttcgaaattcaaaatggctacatgcgattataccttcacacaccagcatgggattgttccttctgctcggattcctactggtcgggttgaccttccaatcaatccagccggccatatacccaattataagcgtctcaacgaccaacctgtgatcaagtcatgcgaaatccctctaggaatacacggcgtatccctcaaggttagcttaacattacccttttcgtgaatcaccgactgaattagttgaatttagctcaagatccctcattacgacatagtccctatcgatgcacctcccacatcggctgtcctctattcacacgctgatttcaaagcgaccatccagccggagaaagccggagataccaaagacttctatgagagatgctttgctgaagcagctgccattaacctgtttttcccggatgtacgatcggagaacatccgcatatgcatgactgcgtggctggctgcgaactgcgcggcagatgacacacttgaggctatgccacctgctgcggccacgcttgctttggaagagaccatatcgaagctccaaggaaagaaggcagacggtatgtaaatcaggatcagctgcggagaactctacagtaccgggctaatccatataatagtctccccgacaaacaaagtcgcatcgattctttgcttctttcaagaatattgcgtccagaaacttgacctcagcgaaagcacctcccgcgagctgagcaatgatatatgcgatatgtgcgagggcttgcttgacgagctccgatttcgacagggcattctgcctgggaacttggaaacttacctacaattccgcggtaaaacaatgggtatccatccattcttaactctgattcgcacactgcacaaaccaatcgagggcgactatctctccagactccgagatctccaacagcgggttagtttggtgctcgggctgcaaaacgaccttgttggcctggagaaagatcgtcggaatggcgagcctatgaatgcagtcttggtatccttgaaggaacaagcggggacggatgtggatcacatgaatgacatattgccgagaacgatcgatgaggtgtgcggtatccacaatcgttgtctttcagctgcggtggagatatacgaaggactccacgtttcattgaatggggatatccatgacccgattctggagactgcagtcctggcctttgcagaaacccatctgaaatggtgcgcatcgtccaaaagatatcaggcaaaggtagaataggtgatttattagactagtagttaatttctgggctcaataagatggcgttaaggtatacgattgagtttgtctccactttgtcagcctgcaggcgccacaatgtgataggtggaagcacgtgcagtgtagcgtgatagggctaagccgattttaggccgagaggctagagcgatgtggcaagccacatttcagccccatatacttcgaaaagcggcggtgaggaatgcgatgaacttgtgattggatagcggtgagtcatgcatgtaagattgtgacgagaaccggtcgtgcattgaatattcgaaggactgcagaatggtgtatggttcacgctactgcagacgtacttccaagactcagcattggttcagatagagctgtgaatgtggaactcggcccaggtctatcggcaagatacaagcatatcggcacagtctgaatacatgatcggttgggtccagatcggttgggttcagatcttagttatctaggaagcgagggcgaatcggggaagactgtcaagctctgggtgttgtatagcaaagaaattttaagtcaacttgggaattgggacactcacacgggtgttttctccttaggttcgaagcctgtttcttttgatgtatgcgtccagttcaaggcctatctcggcccaataaaacacgctccctccttggcaatcttgccactatctgtctctctcaccagcttcgttcaggtcatggcttttgcttcccttccattatcacgcccgagcatccatggagattcctatgcagattttatatttggcctagcactaacctttgtcaacattcaatatattgccgtataaaccatgatgtctacgtctttatctgtggccaattttcttctactgagagtatagtagacatatcaaaagcgaaaaaaaaaaaaacatacaacagtgaggattcgctggtggtcacccacccaactactaactcaccggcgnnnnnnnnnnnnnnnnnnnnnnnnnnnnnnnnnnnnnnnnnnnnnnnnnnnnnnnnnnnnnnnnnnnnnnnnnnnnnnnnnnnnnnnnnnnnnnnnnnnnnnnnnnnnnnnnnnnnnnnnnnnnnnnnnnnnnnnnnnnnnnnnnnnnnnnnnnnnnnnnnnnnnnnnnnnnnnnnnnnnnnnnnnnnnnnnnnnnnnnnnnnnnnnnnnnnnnnnnnnnnnnnnnnnnnnnnnnnnnnnnnnnnnnnnnnnnnnnnnnnnnnnnnnnnnnnnnnnnnnnnnnnnnnnnnnnnnnnnnnnnnnnnnnnnnnnnnnnnnnnnnnnnnnnnnnnnnnnnnnnnnnnnnnnnnnnnnnnnnnnnnnnnnnnnnnnnnnnnnnnnnnnnnnnnnnnnnnnnnnnnnnnnnnnnnnnnnnnnnnnnnnnnnnnnnnnnnnnnnnnnnnnnnnnnnnnnnnnnnnnnnnnnnnnnnnnnnnnnnnnnnnnnnnnnnnnnnnnnnnnnnnnnnnnnnnnnnnnnnnnnnnnnnnnnnnnnnnnnnnnnnnnnnnnnnnnnnnnnnnnnnnnnnnnnnnnnnnnnnnnnnnnnnnnnnnnnnnnnnnnnnnnnnnnnnnnnnnnnnnnnnnnnnnnnnnnnnnnnnnnnnnnnnnnnnnnnnnnnnnnnnnnnnnnnnnnnnnnnnnnnnnnnnnnnnnnnnnnnnnnnnnnnnnnnnnnnnnnnnnnnnnnnnnnnnnnnnnnnnnnnnnnnnnnnnnnnnnnnnnnnnnnnnnnnnnnnnnnnnnnnnnnnnnnnnnnnnnnnnnnnnnnnnnnnnnnnnnnnnnnnnnnnnnnnnnnnnnnnnnnnnnnnnnnnnnnnnnnnnnnnnnnnnnnnnnnnnnnnnnnnnnnnnnnnnnnnnnnnnnnnnnnnnnnnnnnnnnnnnnnnnnnnnnnnnnnnnnnnnnnnnnnnnnnnnnnnnnnnnnnnnnnnnnnnnnnnnnnnnnnnnnnnnnnnnnnnnnnnnnnnnnnnnnnnnnnnnnnnnnnnnnnnnnnnnnnnnnnnnnnnnnnnnnnnnnnnnnnnnnnnnnnnnnnnnnnnnnnnnnnnnnnnnnnnnnnnnnnnnnnnnnnnnnnnnnnnnnnnnnnnnnnnnnnnnnnnnnnnnnnnnnnnnnnnnnnnnnnnnnnnnnnnnnnnnnnnnnnnnnnnnnnnnnnnnnnnnnnnnnnnnnnnnnnnnnnnnnnnnnnnnnnnnnnnnnnnnnnnnnnnnnnnnnnnnnnnnnnnnnnnnnnnnnnnnnnnnnnnnnnnnnnnnnnnnnnnnnnnnnnnnnnnnnnnnnnnnnnnnnnnnnnnnnnnnnnnnnnnnnnnnnnnnnnnnnnnnnnnnnnnnnnnnnnnnnnnnnnnnnnnnnnnnnnnnnnnnnnnnnnnnnnnnnnnnnnnnnnnnnnnnnnnnnnnnnnnnnnnnnnnnnnnnnnnnnnnnnnnnnnnnnnnnnnnnnnnnnnnnnnnnnnnnnnnnnnnnnnnnnnnnnnnnnnnnnnnnnnnnnnnnnnnnnnnnnnnnnnnnnnnnnnnnnnnnnnnnnnnnnnnnnnnnnnnnnnnnnnnnnnnnnnnnnnnnnnnnnnnnnnnnnnnnnnnnnnnnnnnnnnnnnnnnnnnnnnnnnnnnnnnnnnnnnnnnnnnnnnnnnnnnnnnnnnnnnnnnnnnnnnnnnnnnnnnnnnnnnnnnnnnnnnnnnnnnnnnnnnnnnnnnnnnnnnnnnnnnnnnnnnnnnnnnnnnnnnnnnnnnnnnnnnnnnnnnnnnnnnnnnnnnnnnnnnnnnnnnnnnnnnnnnnnnnnnnnnnnnnnnnnnnnnnnnnnnnnnnnnnnnnnnnnnnnnnnnnnnnnnnnnnnnnnnnnnnnnnnnnnnnnnnnnnnnnnnnnnnnnnnnnnnnnnnnnnnnnnnnnnnnnnnnnnnnnnnnnnnnnnnnnnnnnnnnnnnnnnnnnnnnnnnnnnnnnnnnnnnnnnnnnnnnnnnnnnnnnnnnnnnnnnnnnnnnnnnnnnnnnnnnnnnnnnnnnnnnnnnnnnnnnnnnnnnnnnnnnnnnnnnnnnnnnnnnnnnnnnnnnnnnnnnnnnnnnnnnnnnnnnnnnnnnnnnnnnnnnnnnnnnnnnnnnnnnnnnnnnnnnnnnnnnnnnnnnnnnnnnnnnnnnnnnnnnnnnnnnnnnnnnnnnnnnnnnnnnnnnnnnnnnnnnnnnnnnnnnnnnnnnnnnnnnnnnnnnnnnnnnnnnnnnnnnnnnnnnnnnnnnnnnnnnnnnnnnnnnnnnnnnnnnnnnnnnnnnnnnnnnnnnnnnnnnnnnnnnnnnnnnnnnnnnnnnnnnnnnnnnnnnnnnnnnnnnnnnnnnnnnnnnnnnnnnnnnnnnnnnnnnnnnnnnnnnnnnnnnnnnnnnnnnnnnnnnnnnnnnnnnnnnnnnnnnnnnnnnnnnnnnnnnnnnnnnnnnnnnnnnnnnnnnnnnnnnnnnnnnnnnnnnnnnnnnnnnnnnnnnnnnnnnnnnnnnnnnnnnnnnnnnnnnnnnnnnnnnnnnnnnnnnnnnnnnnnnnnnnnnnnnnnnnnnnnnnnnnnnnnnnnnnnnnnnnnnnnnnnnnnnnnnnnnnnnnnnnnnnnnnnnnnnnnnnnnnnnnnnnnnnnnnnnnnnnnnnnnnnnnnnnnnnnnnnnnnnnnnnnnnnnnnnnnnnnnnnnnnnnnnnnnnnnnnnnnnnnnnnnnnnnnnnnnnnnnnnnnnnnnnnnnnnnnnnnnnnnnnnnnnnnnnnnnnnnnnnnnnnnnnnnnnnnnnnnnnnnnnnnnnnnnnnnnnnnnnnnnnnnnnnnnnnnnnnnnnnnnnnnnnnnnnnnnnnnnnnnnnnnnnnnnnnnnnnnnnnnnnnnnnnnnnnnnnnnnnnnnnnnnnnnnnnnnnnnnnnnnnnnnnnnnnnnnnnnnnnnnnnnnnnnnnnnnnnnnnnnnnnnnnnnnnnnnnnnnnnnnnnnnnnnnnnnnnnnnnnnnnnnnnnnnnnnnnnnnnnnnnnnnnnnnnnnnnnnnnnnnnnnnnnnnnnnnnnnnnnnnnnnnnnnnnnnnnnnnnnnnnnnnnnnnnnnnnnnnnnnnnnnnnnnnnnnnnnnnnnnnnnnnnnnnnnnnnnnnnnnnnnnnnnnnnnnnnnnnnnnnnnnnnnnnnnnnnnnnnnnnnnnnnnnnnnnnnnnnnnnnnnnnnnnnnnnnnnnnnnnnnnnnnnnnnnnnnnnnnnnnnnnnnnnnnnnnnnnnnnnnnnnnnnnnnnnnnnnnnnnnnnnnnnnnnnnnnnnnnnnnnnnnnnnnnnnnnnnnnnnnnnnnnnnnnnnnnnnnnnnnnnnnnnnnnnnnnnnnnnnnnnnnnnnnnnnnnnnnnnnnnnnnnnnnnnnnnnnnnnnnnnnnnnnnnnnnnnnnnnnnnnnnnnnnnnnnnnnnnnnnnnnnnnnnnnnnnnnnnnnnnnnnnnnnnnnnnnnnnnnnnnnnnnnnnnnnnnnnnnnnnnnnnnnnnnnnnnnnnnnnnnnnnnnnnnnnnnnnnnnnnnnnnnnnnnnnnnnnnnnnnnnnnnnnnnnnnnnnnnnnnnnnnnnnnnnnnnnnnnnnnnnnnnnnnnnnnnnnnnnnnnnnnnnnnnnnnnnnnnnnnnnnnnnnnnnnnnnnnnnnnnnnnnnnnnnnnnnnnnnnnnnnnnnnnnnnnnnnnnnnnnnnnnnnnnnnnnnnnnnnnnnnnnnnnnnnnnnnnnnnnnnnnnnnnnnnnnnnnnnnnnnnnnnnnnnnnnnnnnnnnnnnnnnnnnnnnnnnnnnnnnnnnnnnnnnnnnnnnnnatcgcgcgaccgggggtgataagggtgagtgcactataaacggggtgagaatcagggtgagaatcacccaggtcgcgcgaccaccgcattgaccccttcagctgaaccaacggcagaatatcattggatcgtgttgtttcccttgaaacactcgatatcttggcatctgcatataactagaactggaagtatcacacacctaggcagtaggcaagttggcaataccaatcgatttggttaatctgctcaaaaagctatctcgaaatcgagctaaacgcactcggcgggacttatatcacgggccaatcagagctcagtgtaatttagatataactaagaagagaggttgggaggaaagatccaccacagcggctgagggactagtgtttataaacatgagagaatcttcctagctaaacctctttatgcagacctgtcacatcacaagtcagtggccagccacaaaagaaacgctaggaaggccaactttgaaagcggagggccaatcaacaacgtacaagtttggacgccacgttcagctgtatcggcacatatttgacccctacactgcttggcagaatacttgcaggagtggttctcttggttttctaacagatatcgacactaaccctcatgtgggctgtgcaaattgcctaatgggggttgcgcatttatgcgcaacccccattaggcaaggcaaggcagataaattacaccgatcaaatggcccacggccctttggaaatgactcggaacatggccgtccagtaatattatcccgcccccgatcggacattggtgaaaatcatctgcggctggagtaagcgctttgggatgactcgtgtgattatgcagcagatacattatttgtcacatctataggctaccccgcttatatcatgaaagtacaccacgcatatatacacaggtgcctcattgggaactatcatttccatccatctctttggactcaacaacgactatgtctcaaagcaaccgtgcatttcaattcgaaggcagcgacagtgattacatagcctttcttgagagccggctttcagctgccttaagccaaggaactagccaggcttctgttggcgcggcgatttcgcggagcgatgctccagcgaccacatcatcggattctcggccgactacttctacgactgtattagcggactctcaacaaggcactttagctatagcatcagcggagcctcagcctagtgactatcggaatggatgttcagtgtttcgggcttctcgtccagccagtcctcgtgcgactggatgtcctccttggtccactagagatgatctcaaaattctatattatgacccgatccgaaaccgcgacaacgatcttcccgataatgctctctccaggttgccatcctttaagcaaacatcggttgttgaggcccaaggcttgaaggagctcagacatttcattgaggacgttacgaggaagtctcattggattaaaaagaagaaagagcttggattatctcgcccagaaatcaaccaagataccattcacgcgctgtgtggtcgaccgtcagcctcaaacctgcgcgatgagtcaaacttatacccaaataatgaaccctcagaacacagcgccttgattatgcgaggatgcgactatggcgcgttgacgaaggatagaaaactgcaaggaaatcttctccttcacatcgccaaataccaacagctcatatttgtgtccttatgtgtcgtcatgcttgaaattggagctccgattgatagtgtggactggatgatgcgccgatatatcagtgatactagctcagcgaatctccggcggcttcgatatggatgtaaatgggtaaatcgttgcatgtctaagttgttagaacggaactggggttttttaagttgggaagctttcctgttatgttggtattcctatccagagtagcttcttgatgctgatcacctcaaaagttccccggtctatccaacaatacggacgatttgcatacacgaaaaacagttgcgaaaccttcgtgacagatatggggacgcccgatctggcacttcccttcgctgaggatgggctcagtccgtactgccttccttgtttcattaaagtgatcgccggcaacgacttaaagtatattaatctcatgaatattggtgaacacatgcttatttatacagcctagttgatatttgcaacagtttgggctatagcatcctactcgtttctccgatatacgaaaactacttcaataatgcccccctggacttcaatcctttcatacatgcatacagcgaacctgtcgtggatttcaatccattcacatatgcacataacgacccggtggtgaattttgacgccttcaaccaagtatttcccagtggcgcagacaatccatgatccgaggagggagaggaagaaacagaagcagcatgcaagctgacaggtaggctgacgagaatgaaaccagttgtggaagttatatgcaagaaggaaaagacgaaagaggaaagagtaacgcaagagctggccgctgagtaatcgactcattattttgtccgtgtgcgatcagcttaggaacatgttagcgacgggcaagcgctgagcggctttcctacatacctgatgatagggggaaccgcaaagatagccgcgagcctgggctcaacggttacatcaccatcgattcgtctcatcagaccatgcttaaaagcacctccgggttcgcttcgcgccgaatctgatatgttgcagataggtataatattgacggggccgggtaacttgtcccatttgaaagatgtgttccacatccatactgtgaagttccaattctgggaataaattagtaggtcgccattcatagaaacttccaaccatactggaaggccaactgttctgagaagaggcttaacgaaaggcgaaacctctttgtgctcatactctagatttcccttcccatcgtcttggaatttcatgccggaaagtgccagcgcgagggaatctagcaggctctttgcttcttcgccgagagatgagtctgtcatactgagctgtgtcagtacgcgatatcggcgagtattttcaattccggcggtagatctcaactgtccaacgtggagtcaaataacgcaataatgtgggcagatggaaacgtgtacctctgttttcaagcggaagaagtttggagcgaccgaggtgtggataaaagaggaattgccgtcgcagaacacttgaagatgaccgcggggtgaggggcactctgacgggtcccgtgaccttcggtacccatcgttcgacgcgggtccacgacaacctagtgagatcacagcccgaccagtggagatactatttggatgtcaaacatccgtcttgatccttagcatgctgatagtgatttttttctctactaacacccgacatttaccaagttggtattttgcgaacattttcccttgcatacattatccggaatttggttccaaggttataaggtatgcttacttatcgtttcatgcccaatagagatcgaccgcatatatgtggtgaatctccattaggcaaaccatctttcaccaaagtccagtgggaatgtgacatcactactaactaatttacaatgtacgggccgtattctatatcattctctctgttattttgctttagtaaaacccacaactcgatctctaggagtggcctagaaaataaccatcttaaaaccaaacctatgagaatttatgactcttcccttttagtcgctgcaacgaaaaccacataagatcaaggttttagattgatatcacaatactcggtattaagaacacacccacacgaagaagaaatcgataacaggcactaaccccagggctagtgccaagagattacttgatactgacaagttaaatcaaaccgaattacagggttttgattcaaatagctatcttagtagattcttccaactaatcacttgattggcatcaacatatgttcggagaagaaccagcccggtcaaacgaagctaacctggtgtctcaagatcatattgttcctttcttcgctataaatctgaacgagcctccgtcagcgcagaaagcacacttattcatggaccagtccagcccccaaacatctaccacgtcggaactcgacaccactcccatcaaggagaggcaggatgagccgtccttcgatctcgatccgccgacatttacgcctccattcccaaacttcaaccccgcgtggactatttgcaatgttgctagtacacaaggtctgtttagcttaccaaataggattggactctagctaaccattgcagtaccgattgtggttgtcacaaaattgggcgcaagatacgttgctatcccgtgtaccgaagaacttttaaatacttactaccaattattccctaatcggggccttatgttttccatcgctcaggtttataccggcatgatgaagatatcgtcccactcgactctccacagacaggcaggaatggctatattgcaatttcttaactaggacatacactactctattaacgacaccgacgcatactcagcaaaaatagcgaaacgacttcagacagatgtgcttgttcggatggatagagggcggatagaacatatccagagatatgatctgcctttaaggttaggcacactggtgactttgagggaggagtgcaatttctagttgattgaggtttcatggtgtgattttaccacccctggggttaggttaggagatatcacagatttactggcatgcttcaaaccataagtcggcgtttctctattgctccccgtctcgatttgtcggagctagtttatttctattatttcttccttctccagatattacaggccttttgctgtggagggttgctagggagggcaatttggcacagcaagggaagcgctcgatctgtatctataattggtgcattcatatcaaaaacggggtccgcctccaccgccaaggtgatgctgagaagtcggacttgcttgatatttaagctcgattgaggtcctattggtggcagcataagctcctctgcttctggaatgagaaacttcgcttgtattatatatatcccttgccctacatccggattgaaaaaggaacattaattgctttaccgttgcactattgttggtttatccttatattctatgcacttctgattatattctatgcacttctgcctctcatttctctacaattgaagttaggtataagagcccgcgagctatgtgtttagatctgtgctgacttgcttcgtctgcaaatagttcgagcctcacatctccattgaaagcaatcaacgcaccgttatataggccttgattattaaggttcgcgatatcattaatccaaagtgcatagatagaggctaatatagattatagtgaagcatcatgtgttttcaatacacctatacttatggatgtgaatgcgtggaaacagctccactatttccatgtgccgataaggtcaccaaaggtctctgcacaatgggagaagtgctaccaagaaaacagaatttcaagcatcaatatggcaagtatcgtatggctaagccttaaggtttgaagccagggcttattctcacttccattgatgagcacagtgaagctataaagaaattgatagtatgaatttgaataataagtcattaattagactagcaacatcgatacaacagctctctaaaattgctaagtaacgtaggaattacccaattaaataatcacttaaggcttttagaaaaggtattccctccttcatgctctttatagaccacaaccctctaatttcctagagttaattacatctttacaagaactcaccattttttcatcggattagcgcccaagtctgttttcgtgcgatttatattaaagaagccccaacagttacttatatttatcaattagacgaacctatagaaagctataaagtgtctcccttcccaggtaactatcctactaactatcccagtcacatggcattttacctcctcttctcttagctatatcaataacaccaataacacctaccaagcccctcactgcgcaattgctacaggttataaatcaattttgtatatttttctttgatccaacacatagcagatatgtaactaactattcagtccataaaatggataaccctcagttcatgattgaacacggcgatgtcgctacttatatcatctcttcggccccgtataatgataggcccattactaccgatctactatctggtattctttctcggcatataggatatgcccctccgacgttcattaagaatcttatagggtcaaatgctagtaatacagacttagaatatatggtcgtactatacagtctgctaataatggatatcctgccgcccagttccctacatacaccaatcaagcgtatactttactcacataatggggaggaccttatacattatcttatggataatttggacattagggtagagagccagctaggaaggatataatatctctgttagcccgactataggaatttggccaatgcatttcgagccgttgagatagtagaatcattaaacgcctaggggagatggttgttttctgtataaaatttgttcagctcatagttagatattgattctccgatgaatagagaaagaatgtacttttaggactattatctagtcaatgaatatgatgtgatggatcacgttatgagttgtgtggccttccatgctcggtgggagataagttcgagtcccatatctccattgaaagcaaccaacgctccattgtatgaaccttgattattgaggtttcgaattagaccccctccgttgcttactttatcaaattaggcgatcctacagaaatctataaattgtctcattcccagataattattctcacagcaagtcttcctattttcccttaaaagagagacttgccggtatgtccttatcttcatcgtccacaattagcatcatcaatgttagccaaggcctatctggcctaagggccaacgtaagccgtgttttcgtcatttgttaccaagaatataatgcaacaggcacaccactataagttgactcctagcagcacagccaatttatctaacaaaagaataaggggcaaagaaagtatcactagagtgaggcttgaagaggggtcactcactcccatgaatgattctcattctatcgcggctatatttcagaattcagaggttatccaagatatctcggacgatccacaaattagagggctgaaacttatcgtatacgagtaggtaatatattcttcttttatggcttaatgaccgacgaagtgataatcaagcccagccgagagtacatcaagtacttcttatctataagcacaagtcccccactcatatatccaaaatcagctaatgtcccagggcgttcttgatcagaatcgcagctccgcagtctgcctttataccaatctctagccatatatccctgccacaacacgtacaggatatcagcccatttgacgtatatgagcaatattaaatgctgtggatgcctcggtgccctagttaagcacccttatgatagttagttagatagttagatagagagctctctcttcccctaatacaaccttttttacttctatctttagtacctacactctgtattttattatataataattgatttccttccgtattctgatactttattatttctttcgattccttccatactaaatttcctagtacattccagtttactagttacttctaaatatttccataccatagctcacatatggttcaggcaaagattgggatagacagaagaagctcgacatagcaagccctttagggtcaaggtaaattgtctgtttagttacaagatctataaaatctgaaatattagctcggtaagaaggtctggctctttgtcaattatagcctaccattggacaagtggcggatatattttcctatatcaaaccgtactgctatagttagtgagcatataaacataaatgagcttctcttctattttgattgtattcatgcctctagataactgcaacaaaaaaggcccatggattgtttccctatactcacgctacaaagcctactgccgaagtgggttggtccttttttctttcaagacaatccctcgtcagtctggggagatcaagaaaatcgtaagttgcacaaatacgcgcaatgatagtattctcgctcactataaggtatagaggacgccgaatcagacagcatactcgagcttccaaacatcgaggttccaaaaatcatcaacttttggcaaatgccagacccttgagtaaatactgctgtctataaaggcatagagaatgcagagtcttctctagggccagacaatatccttgggagaatcgaaaaattgccaacagagcttatagattccattatcgaggctagtgttttttccgagccgcttggatcacatgatgccttacatactctacaagctttttgccaggaggagaagggctctatctttaaaactaggattcacactgttcttagaagcctttcgcttcggaagagatttgagactagttgggaactctaccctaactttgaccatacgaaggctcgtcagtgtactttcgataaaactgctctgtatgatttagccttaaaagcaattgtcgattgtccttagtgctttatgtttctactcgatcactaaataattagtccctcctctttttatcgggataggtaaaccctctatctgattgcggtaaatttaaagaaccctgatttgatagagtggacaatgtctgcgatagagcccctcgacctccttaaacctatcttggtagagggacatatgataatattataattcactacctaggatgcctagttgttctagagctgctggaaacgtcttcgattaatacctgaaattgaattaatacttaggccaacggagataatgaatctgtgtaaatttgccgatatagatctagtaaatcagctgctataccgaggtgtggatcttagaatccctaatccaaataacggacttctgaattggtatcagcttttataccaataaaaccctgaaccgatgttatgttggttctggagccataacgaagagatcctagaagacctcttgacttatgtggcgagacgcaactgtgtggccggagtggtgtggatctcgaaccataccgaaagccacgacgactggcgctaagctgtatctgtagctgccgataaagtggagcgggagagcgctgaaatatttgaattccttatataatacccgcctccgggatatagaagggacagcatgggccgcacgggctgtatactctctgaggatcttttgatcacgatcgtcggtagagcgtgctctaagagttgtatatatgatttgctcctcttaggcgaatgctccaatagtgatatacaacgtttgcaaagcgataaagcatggttggaagaggttgctgctcagaagatccaaacaattcaagggttgaatgagactgtcggagtggttagcattaaagttcaagcgaggaaagccggtctaaagttggtgacagaagctctagagactttcaaaggatagggtagcattggtcattgtactcaatcaagttggtgcccaaaatatgtacccgaagctcattcaatccccgggtatgcctactgttgccggccgactaggcggcnnnnnnnnnnnnnnnnnnnnnnnnnnnnnnnnnnnnnnnnnnnnnnnnnnnnnnnnnnnnnnnnnnnnnnnnnnnnnnnnnnnnnnnnnnnnnnnnnnnnnnnnnnnnnnnnnnnnnnnnnnnnnnnnnnnnnnnnnnnnnnnnnnnnnnnnnnnnnnnnnnnnnnnnnnnnnnnnnnnnnnnnnnnnnnnnnnnnnnnnnnnnnnnnnnnnnnnnnnnnnnnnnnnnnnnnnnnnnnnnnnnnnnnnnnnnnnnnnnnnnnnnnnnnnnnnnnnnnnnnnnnnnnnnnnnnnnnnnnnnnnnnnnnnnnnnnnnnnnnnnnnnnnnnnnnnnnnnnnnnnnnnnnnnnnnnnnnnnnnnnnnnnnnnnnnnnnnnnnnnnnnnnnnnnnnnnnnnnnnnnnnnnnnnnnnnnnnnnnnnnnnnnnnnnnnnnnnnnnnnnnnnnnnnnnnnnnnnnnnnnnnnnnnnnnnnnnnnnnnnnnnnnnnnnnnnnnnnnnnnnnnnnnccccgacgactggcgctaagctgtatctgtagctgccgataaagtggagcgggagagcgctgaaatatttgaattccttatataatacccgcctccgggatatagaagggacagcatgggccgcacgggctgtatactctctgaggatcttttgatcacgatcgtcggtagagcgtgctctaagagttgtatatatgatttgctcctcttaggcgaatgctccaatagtgatatacaacgtttgcaaagcgataaagcatggttggaagaggttgctgctcagaagatccaaacaattcaagggttgaataagactgtcggagtggttagcattaaagttcaagcgaggaaagccagtctaaagttggtgacagaagctctagagactttcaaaggatagggtagcattggtcattgtactcaatcaggttggtgcccaaaatatgtacccgaagctcattcaatccccgggtatgcctactgttgccggccgactaggcggttgtttgctcagatgaccttaacaaagctttcctttactagttttcaatgcagcagtctgttcttcctgtttggattttggatattaattagtccccgaggtcatactatctcacgcttaactaagcagctataggctcttcagagctagggctttctcaggtggcggccgaccccgcagattcggttatggcgtagactaggcatcttaatgggaacgattatgcatttaaaataccgttactatgtcgagtactatggtcttcgtacaagtcaggccactatagataaactacgaacctctcatatttacgctagtggagtggaaaaaccgagtgaggaaatgagtttccggacaactctcagggtcaatacttatatttgctagttttatccagattcatatcgagaaatgcaactagaatcatctcgattcgaacatgccaaatatataaagctccatatctcgttgtcttgcctttctatccctcctcctcccagtttcaattacaactattctctatcaagctagactgttcgggcctagtacagggacgcaaacatgacaacagcgcagaacagatcgcctcgttacaataagctatctggaatggagatcacaggctttatggtgttttcagcttcctctaacggagccgacataaattccgaagtgaagcggtctctacacttatggccaaagatagaaaaagcccctttggtctatggcaggggagatactgacacatatacgcggtttttacagcgtgggaccgaggaaagcgacgtagtaggtttaccaaagagtatattaaaccaaggctgacaaatagaagttcactcagaaaatcaaggaggctataggcaaagttggctttacctatcgtcaaggccccgttatcgttatctcctccgaaaaacactcatagggcactaggcttacgcacctagctcatcctgcggtatctatctttcgggatctttcgaacatcgaaaaaaccagagtgacttttatgctatacccagaggatttaacaaaagaggaaacgcgggaaagccaaccagttaagcggaagctacggccgaacgaaatccttttcgtgaaaggatcagtcagaatagagatagaggttcctgctggaggctcctttatctggcaagggaacactggcgcaccaatagggcctgatatatacaggccagaggtgttcgaattcatggcgctttaggcagctcgcgtcctagggaatcggtagtattagacgcggaacctagataaagaattgtattagtcataagatataataaaggatataagttactaccaatacctgatatttagacttaaaatagagaagtcgttatacatcaataagaatattagtatggctagctcttagaagctgcatggctttagcttcttcgataagagataatcggcagaaagtaggcaagaccggggcaaacagaagtgcaattccctcactaaactcaatctcaaaccttctaagctttcacccctattaaagagcactacaagcattgtgatcgcttaaccgccctaggtgatgaaggaaagacagtatcgaccagataccgcggacctgactcttaggatgtgcacagtctaatccttgtgtccatagccattcttcctcttctaaggctagagaagaccatcgaaggatagtttgtaggcacacgatccataagcgtaaactcgcaccacatgaaataaaatccacagctgtactagtttccacaatagctagagagaggtcggcttccaaaaaccttgaaaaatgttccatctaaatggataggtcgtaaagcagaccctccgcagtgactggtggattacagcgagctaacattgtcaatacgtgaaagtgggagtcgctcagataggttaagtctcccccctgccgctgactcagaaacctggaaggtgaccaaataggtatagtatagaatacatccccgcagggatagttggttactcagaacatagacccacccagactctgtatgatagtacatgcatgcccctgaaatgggtatctttgtgataagggctccaatatataagcaatacatcttgccagagaaccgcggatccatatactacccatcaactatagcaaacatctttgcgaaccgatccatgtcaaggctcaatatcttcacgctgctaatggtatatttcggggtctcaaaggtacaggcaaactctgtttagcagattaaaacaaattaactaactacttaggccaacactaaaaattacccaacagaactaccggattcccttcccttagggaacattaagactcaaccgggcaagatctaccctccgaacatacaaggacagccaagcagcccgccagacataagacttcatcatggtggagtatctattcaaggagaagatccaatgcgcctcagcggaggtcttagcgcttcgccacatagagcagcaagtgatcccgtgccaccaaagggaaatgttaccaaagttttatctatcaagtatccgggagctttagctttaagcaaagcaaagctacgtattataattgagtcacaagggaagcaaacaaaggggtagtacaaacataagaaattcgaaaagagtaatagtataaggaaggcactagaagaatttagacctacatggcgataaggaatacagcgtcataatatacagtatactcggtgaccaatacaggttaaatagggatataatggaaagagggcatgcattctaagctatactacttctagacatatagcgcgtccttagtacccaaatttgcagctaaattgccacatttcatatcgccgcctcaatactgcttatattcactggctaaatcaaccgacataccgaatagtcttaacagatttaacaaataacaacgctggttaaggtctggggacagaataatatctttatagggtatacattctgagctatactattttaggataatatggcctttagacattttatacataattagcggtatccgtttattgcttacagtcaggattctcctctataagaagctacttaccaccttagacaaatcagggttctgccgaacaccaagggttccaatcacactggcagagaccagcacaaaagttctttcaaatggaatcactccaggtcagtatatatcctccttacctaccagaatgttactgaagcctaccatatagactatacgtatccaatctgattttgaatacaatatttgcaaccaacaatccgacacataccatgccctcgctcatttcaccttggatattccgccaggggaggatagcaaggttttcattgctattccactaggcaaaggccagtttaacctagcagtggaccaagctattgttggacgagtcaaatcccaccacaccgatctgagctatttacagttgttgagctccgatctactttttgccgccaagtttggtcgttcgtatgccgagaccgcgtttcatgcgttgagtgaaatgatatccaaatacaatatagcagcgggttcagtctatatttcaaatgaccaacgcgttatcaactggtttgaagcccaaatagagcgccttgaagcactccgattacatttttataaacaaatcttgcaatgatgaaacttctctgtaaaatttcgtgtgggcaagagacaaagtgcagcaaggcctagaattcgaagagcaggggaacatctggcaacaccgcatgtaactagcaccttaattaatgcaccagataatctgcccaaaaatatacctacaagcccgaaagtgctggttattctacttcgctatcatgtgctcaccccgatgaatgattagtaagaatatattttcttttcctgcctcataatattttctttactttaacataacactgcagcatttaattgcgatgtacccagattttggatcatgccgctaaacagaagcgccacatccaatgtctactaggaatagaacggtcatcaataaaaattttgcaatagaatgttgattgcccggccgatcatagcatgaaatgcaagcaacttctctatactgcatactctcatgaattaagtcacgaaccctaatctgaaacgagctaatctaattttagttcaccgctccgtaatggcggcagaactgtaacggtaatggtcatacaaaaatcgataagtcgtggttataatacagtaacgccccatagaatcgcggagcatcttttatgcggaagtccaattcccttgcgatgtcaacaaccaagacaataatgtaaactttcaacaccagggctataaatatatagtacagaatggacttatgtctctttggattgaaggcattgctacacgatcatacgttagttagtcttcgggggaaaaagaactacggaagacgcctggaagggcgagaatcactcaccatgagccaacccataccctcagcaataccagagccatccacagcagagcacgcaatagctttccactctcggttccgaaattcgtctagtttcaacgcctctgatatctcctccggcgtctttgccccctctagatcctgtttgtttgcgaacacgagaagcggagccgtgcggacgtctcgcacgccctcgaaatccagtaagtacctcagttcaaaagcagcgttgtccagccggtcgatattagtggaatcgaccacatatatgatcgcggcagtatcgctgaagtagtggccccacattggacgcaacttgtctcggcctcctaggtccttaaggcaatggcaagtgggtcagcatcaatagcacactcaggttatctagaagaggctctctggtccaaaaaaggaaagtgatatacccaaacgacgagatccacatctctattatatgtcactgactccacattaaatccaattgtggatactgtgtcaacgggcccgagattctagagacggccgatacttagtgtttaacaagcgaaatgcccgtggctttgtattacctttagttgtgagtagaggatggtggtctttcccgaattaaactaattatacaacgcgtggtggtcagtataataccaggtaggcatctccgagtgcgtaagacgccgaacgtacgagtccccacatcaagattcgatactccttctttcccaatagcgagggcagtagatgcgatagtgaggcgcccatgctagtgatgggtgggcgatcaagcggtggctcgttgctggaacgtaagggtgggaagggtacacgtttctgtgagtgtcgggaagagcacctcgttcgcattgacggacacgctactctattatataccaggctacgccgggcgctaaacccgagggggaaaggagaatccttgaaatgcacgtgacttgatgatctcgcagttctcttatctgagggatgtggctggttattgcttgctgcgcttgatatgagagttctggcttgggtcgatccgattcctgggaagatggtaattacaccgatataacaaacttggtctgcgccaaccttattccctgtcctagaataggagtcatctgatggtgggtctgaacatgtctaatggtcaaatagatgtggggcgagcatccatctactcgaactatcactaaatggatatcaccgcctatcatcgcggcagtttttagtatttataatcccgcaccttccaggcacactaaatcatttcaccccttataaagccgtacgacatatgagtgctttttggaacctccttattatgtctttctggacgtgagatctgattgcttcttcctgcctcaaaatcctttctacacccactagcgttgcacgtttcgaggaaatgaccataatagaatctctaccgtttgatatcatatcaatcacactccatactctcgatttaaattgccccgctcttaaatcactttgttacgtctctcagttttttcgattttggacgcaacccctcctttttaggaactttcaatcaagtttgactaagataaaacatcagtccggctgtaagtatttgggaatgctccaggaaattatagatgcgagatcctatggcgggacatgtctatgtttgtcttatttatgtcatgatgtcataggaaatgtagttgtcattgaaattgtgggtgttccatatatagcgacggaactagaaacctcaaatacccaactgcttacactttctctgcgcagtctccgtctactagctcacataatccatttagcattccaatggttctctattctcttagcaaagagaagtcttttacatgatctttatattgaggaatcgcctcttaagaacccccctgggcactgcaattttatccaccctcagatctactggttagactcgtattcggaagatgggtctcttgggtaataatttctccagatggatgggactgaaagctgcaaaacagcgggagaaagatgaagcgtcacgtcgcgattccgatattggcaggcagctgaagcttgaaaaggaaaaagcgaaaaagacctttaagatactcttggttggtacgcatacgggaaaattttctgctgagataaccaggagaatatactctttcctctatcgctccttagctgtgctgtaacaatatattctttatttagcaggtctaaacgcagcaagtattcaagtaacaacagaataacaaattaaatggaacaaggacagaatgagcaaggctcttagacagctctagacctttcgataaaacggtgtgatcgtcgaagcgttgacggaataaccttgtgattttcctccgacgtgatagtctcgcttgtggacccagagtgtctgccttctgggacctgtcaacaaaagctttgtatatgactttaggttcagcttaccagcgtgagacgtttgaagcgggctagcctcgatgtcgtagtaataagcttgcatatcaaaactgtctgtaatatccagagtttcatccactaggcaaggattgcttgtaggtgattgcccgacgacctgaaggcttccatggtcttcgtaggctagcgttcttctcggtaatgggatgaatggcaaagagatagcctggcttctaccatcggtataaaagccagaatgatctatgtcggcctcgttcagatccattgtattttcacccgagggcattgagtagagagctctggtgtcatcatactccagctgtcaaatttataatccaggtggcccaaaacaagaggttgaagcccttgagtgcaaggtagaacaggaagagagagatcagagcttggttcaaggaattcattctggagcctagaaaaaacaccttcgaaatatgtgcaattgtagaagcaagcctcctcaataagagcttagaaaattgaaagccaaacgcttgaggcggactcgttacagacagcctacttgttacgttggcttcggatttggcgcacggttacctatagttaagagagtccttctagaccaatgttaggcctgtgtttcccaaaatggcagggtatgggagatatgagccatgtcgctcggtgagagactttttgggggactgacagaaataagagctgttttttgtgtggaatccaggattgtgcagagctgaccatatccgaaccatatccaaggaatggaaagaagggaagtcagtcagcctttttaatacccaggcgcggccagagcattattagccgggaataatgcagtatatcgcctttcagacacccatacaaccgagaactgcgataccactgcctcgttgatactactcctgcttgcgtcgggtgatcacttgggagtattccgggcgaatttaggcgacccgcctcgtcgaagggcgccttggattcgtagtacctactgtgcaagggtgccgctttcttcaacctgtaacgttgcagccttcaagacaccttagccgaggtttgagggattaggaaggaattgacaagaaatcaatacgagcggcagcctacagttcactaatcacgcaagccgatcatgtaagccatcaatttcatggatgattgtgatgcctcagctcagcctcagagctccttggggcatttttgcggttggctagtgagcgaaagcgggcctaatgagcgacttactgatgatagtctaactactacctgaacggattcttatagggctcttccggcggagatcccaatgtcgagacggtaggcttaccgaacgaacccgtatagggtcctttaagctatttctcctagacacggcgtgagaaaccagccactcaggttgacttcttctttcatctctcgtttcgcagtgcccgaaatagtttagccggatgcctcaaagcccccctcaggtggctcccaggtgaacgcccaggagttctttttgcctttacattcatcatcttcgcataccggtgctcgtagacgaagaagaatgtagaaggtaagcctttgaggaacataacaaaaataagagcacttgcagaaaaccgggctatgtcgtcaggctgtttgtcctgaagaacgaaagggttatcgatctcttccacagacaaaatggaaaagcccatgatgttggggtgacgttgaataaacttgggaaggaagagtatgttgctgtacgctcgctgctcattcctgggggaacactagatattcaagctgctcggtcccactaagtgttatattccattgctgtctagaagttctaaacaaaccatgaatttaataagacagcccgagtggctgataccaaggcttaagcgcgccaacccggcctacacttggtgagagaggctctagaggtcttcaagattaagacgagttgatcattgtactcggcaaagtcaagaaatgtttatctggggattgtccaattcccgtggatggctgtctttgcgggagaatagacgcttgttagctcaggtaatctaggcatggtttatcccgcaaagggtaagcatttgatatgtcctgtggatggtgctcggcagataggacagctcttcgggggttcgagtttttctgcgcacgactcgcaaatcaagtgcccacatagaattgtcacccagtgatctggttgcatgtaacagatcttgtactctaaaacacgcctttctctttccctggaaagatccacttgcgccttttggtacctctccttctcctggcgaagttcaccttgacgtattcaattttcctttttcaaccgttttactttatggcggacttccttgttgagcagctggaaagcgttgtcctaatctattgttagataaggacgaagaagaggttgcgaggaacaagtactaaagcagacggcttcttcttttcggttcttttccgtttccgcgatcgagtctcatcttcggctgcatcgataaacatgccctcggaatcttcgtagctgttattacaacgaggggctctctgaggttgtgggctacctggctggaggtttggcagtttctcgtcattggctataataatagtgttggaatggcttgccattgtggcccggtgtttacatcggaggaatgttaatccagacgggtataggaagagaaaaagaaaatattatagtaagtaacgggctaggggaaggactttatagttgagactaacagtatctgacatagccccggcacttaataggacactgatgagtagcattatatgattggatgtcaagcccgcttatgtcgagcaattaaactctccggttaggatagatgtctctccattgatattgggttctctttctcatcagttgtaaataaaatgcagaaattgctggtcaaagattataaggaagcccacagtggttaaagcataaccataatagataaaagagtgctgtgggaagatgcaattgttcggaaaataaggtaaatctgataatttctaagttaaactaaattataaataagactgaaagcaatgtgtgaggccagctcattagaaacagtaggtaagcaaaaatttggtttgacaccggctcataataagactaaaggaacgtataaaatcacaagtccttattgtgctgtgtgcccacggttacctcggcgtcgtctccgctgcgattcttgtgtctcttaagggggcatcgggctacgtatctttagtagccgaatctgacgcttaagctcttttatctctgtcgccgagtcctttcttatcttatgagttgattttcgtctctgtgtagacgaggctagaccacgagctggcttactgtggtatcttctgttatggctgtggcttgactgaatagaggcgtcgctcctatcgtcgttacttttactagccttaaagtgattcctcgtctttgatctacgttggtttgtgtcgcgtgcaggctcgctaacttcactatcataatcttctttattaatatcgtctaatctatgctttctacgataagtattctcgagttctttagctttctggtatatcactctatcgccatctaaggtagagccggctgtgatatgacggatgaaggatctcccttctaaagtaaaaagtctgtctttctatttgacaagtatccgagtttggggatatactatgcctttagcgggtaggagtagattgagaggattaagtccctacttatcatcgtcttcgaccttctaactgatgccaataaagtcctccacgtcgtttcgcttgtatttccaaaactccctaggaagcctgttcctagtcccggttactttagcggtaccgcgagtcttcgtggttaaaatacgttctacccgacttgggttgtagctcttatataacccggcctgaatgtgatagatcggcgtggaccggcttctgtagtgcacgaatatctgagagctagtacctttgggccactaatataatactttagccgagtgtaattggcgttgctatttcattgttcttgcttctagggtatcaagccctgtgagttgaccactattaatattaatatctgattcggtactagactctttactagctgagagctggcgagtctggtctagctgattgtttccactatcggaagtggagtcggtatcttcattaatactaggattttgtgtcccgattaattgttcggcccactcttaactgatattccaggacttaggaagataatgtcgtttgttgaaggtctttagaagactacgtgttgtattataagccgcctagaattcatctggagagtgtgtctctattaccttgtttgctgcttgctgctaggtattgtatagagtattgtagctagtctcgggtatggtactagtgtcaatgtcgttgacgtcgtggtcttcgttggcccctcgaatgtgttagttaagtctttgaaagaattgaagatatgctttgtaattagggctataggatgtgaagaaatccttaactattttttccgactctttggatgtctcgctatgaatgacatttttgacctagcgacttagtgggtctagcttatgttcaattggagtatcttgatcagaagcatccccgagttcgttatctgtttcgtcatttgattcgtggttacctgcatttggggtaaagttatctgggagtgttgggcttctaacaaatcttgccttctgttcgggagctttgcccttcttattttgactatgctcttgtcttaattcttatgcgctcgaggatttaggttgatgggattcggagtctgagctcacttccgtgggtgcgggtgtttggatatcatgggcattttgctgggccttttgggccttctttctcgactttttgaccatattgtttcttggagcctagttaacttccctgtattcggatagagaaggcataatttatattccaagctcgcggtagtggttatgcggattgcaaaatcgatgctgtaggccaaaaaccatgctataggccagaaaccatgccgcaggccagaaaccatgccgcaggccagaaaccatgctgcaggccagaaaccatgctgtaggccagaaaccatgctgcaggccagaaaccatgctgtaggccagaaaccatgctgcaggttaaggacgatactgtaacgtaggagcaagcccgcaattagttcaatttctagttgagcctagttgagttacagtcaaaaatcaattgtggtaatatcagcggtatgtggatgggtgactgacaaggtaagaggagataatatttctaggtaggattacagatatttagacgagctctgtacatagacaaatacaaggctggcggaagtatatccctattcggactagtgttatttaggtggggcccggggagtaaagagagaaaaaagactggaaataataatgatttggaatattacaggcatattcgaaatcagttttaactcctcaatctcttcccttaacccatggccccacctcttaagagcactagtccgtatcgagacacatttccgccaacccctgcatttatccttatccttgattagccagcataaattacagtatctgtttcttggcattattcagacgtaagcaactacaacgtcgtcgttgggtttctcctgcatcgctctttaagtctcagttctctgaaacattctcgggtaagtatattgagtatattcagttgaacggtaatgtaaggcatcgccatataatttcccactttgtaaatgcatactgtagctatatacggagaaacagtcgtatatgcccgtacatggtggcagggcctgaagaggctttgattgggctctgattggtaatacgaaagtcgcgatcaggttgaagcggttcgcatttatttgaatctgttataaggtacagagctcctaacgttatgagtaccacgtgactgtgattgtacatagggtgtggcacgcctatgacgctagatattgaccatagctacaaaaaccagactcagcgtcgctcatacagcatatatgtatggttatggcttgcgataaaagtcccaaacttgtagttctcattgacgccgataatgcgcaattctccatcgtcacagacttgcttgcagaagtcgcaaaacatagcacagctcatataaagcgggcctacggggactagaccaatactaggttgaaaggatggagcgatgtgctactcaggaattcaatccagccgatccagtagtttgcgtacacccacggcaaaaatgcaaccgatttagctatgatcgtagatgcgatggatctcttacactcgggcaacttcgatgggttctgcctcgtctctagtgacagcgacttcactcggttagccactcggatccgggagtctgggctaaaggtatatgggtttggggagcgcaagacgcctaagcccttcgtcgctgcgtgcgatgaattcatatatactgaagacctcaagtatctcccagaatttgccccgaattccaataaggtcgaagtgcctaaagcccgttctctaattcaagatgcccgacataatgataccccagatagtcagctgaagagttcggcagagacgagtctcgataatagtggatgggctcggctatctgaggtcggcgagcacctcataaatcgacacccagacttcaacccctccacacatgggtattctaagcttagtgacctaattattgcttcccctcacttcgacattgaggaacggcctcctaaaccaggcgaagcgccagatttattggtccgaagacgaaaggcctctggtggaaattcgcaagtctgatttattattctggcttcatcaaataacgccaacgtacggagataaaattacggtattgaggtcaactgatcgaaatgtgggccgtctggcgggaagatgtcttgatgcggactagtgtgcttgaagtggggcgacggggataaaggaggagagattggagttaaaagtgattttgaatatcactgtactgtggcaattctcacttaagttcagacgtagtgtcttgtaagaatgccatcatttgccctaatacattcgagcactggaaatatttagtctgataccacttagcaacagccatccagttcaatatgtcctgttggtgaagttgaatggtcatttgcgcttcctagatggttgaatttcggcctttgatttcggcttccgcttgtcttacagcctcttcgaagcgagatgctttggcttcggccgccctaagtttctccacgagactgaggttttcagattgtatacgagcaatattttcaagatccgtttgcttttcgcgctataagaacccttataagttcaatgaattatcctaaagggttattgggtttacctttgcaggaactgcacgaaacgtttgacctacttcgcggtgaagctgtatgtaggcccctaccgagtgtttactcatatgcttctgaaaaagaggcttaagcgatggatcatctatctgccatgtatagagacattcgtcctctgtctttaatcggacctcggaagggtctactttaatttcgagcctctcaactggtcagagatattagtatgtttaatttaaaaaatctgtggagcttacatatatgctgagcgagtcgcgtcctgcaagttgatcgctaaatagcccgctttttattacctagaagttgaatttgttcatccatcacggtcgaaatcaggtatcaatgatagcacggcttagctatacgacgtgattgcagtcagcaggactgaaaagattggctagttgagagccccttccccacctaaagcgcagatccgtgcatttcataataccctcacaccccccaggtctctggcaagaaatgatttcaacctgctcgtaagaatcacctccattccgagccctcggaggggaccggagaactttcaccagtactaaaggacctctgaacgtcagcctaccaaacggccaaaagcatgttaaagtcattggtgcctaaggcatgaatccactcgagccaagggggtgagtaagctggtttacttgagggagataagagaataagtgccaatttacagtgtgtgtgtatgtgtgtgtaattcatttacgctgacccctcgtcgaaacgatatgcagcctaccgctactatatatatcttcctatgtacatgtatcgtgtaccacttcctaagcgaacttggagcctcgccgaggcctgccgtggcctctatgccgtcgttgtgtttatgctgcccttatggcgcgcggctttgaaaccgttgcgatgcttcagcaaaatccaagacagcctccactatcttggttcgtgatgcactgtcaatcttacctcttccttcttctcctggacactgtacagtaagagtcgaaatcagattcccctttaggcacacaccccttgtttctcggctcgtatccgaaaccacgctattccgtatatagacaaccctggtaataattattttctaagcatagattcttttaatactaggacgacagcattacgtatattattgtaaggtacccgaaactctgatacacacctcctcaatgcccctcctccatactcttgttcccttcctttgcagcaccactatcttgcaaattgctacatcctctgcccaatatggcaccgagactacccccatcaaagctacagtttattcatgatatgatgcaaagccagtcactaaccacatctcaaatggctgatgcagctgaatgcagcgaacgatgaatatccgcaagaacttgcggctattcgggaatgtcaacgcccccccaaatcgtgtcggtcggagacgaactataaccccactgatgatagaagctctccgcgaccatctactcgaaaaacccggtctctatcttgacgaaatggttatattcttttgggacgaatttcggatgctagcgacaacctcaagtatcaggagggctctcacttttatggggtggtctaaaaagaccacgcgacagagggccaaggagcaaaatgcggaattacgggagttgtatcttcataatctctcagaatttgagtcataccacctagtctacgttgatgagtctggttgtgacaaacggattggatttaggcgaacaggctggtcaccactcggtgttgccccggttcaagtatcacagttccaccgtgatgagcggtatcaaatattgcctgcgtatgcccaagatggtattgttttttctcgcatttttcgcggttcaacggatgccactgtgttcgaggatttcatcgatcagcttcttcggcactgcggacgatggcctgagccaaaatctgtcttggttatggataatgcatcattccaccactctggacgtattgcgcagatgtgtgccgatgctggagttaaattggtttatctccccccatattcgccggacctcaacccaattgaagagtttttcgctgagctgaagggcttcataagacgcaattggggctactatgaaaatgacccgaaccaagtatttgattgcttccttgattggtgtattactacggtcggggcaagggaagaaagtgccaagggccactttcggcacgcaggcttgactattgaggatttggatacctgacaattcgtttctggtggcgtcatttcattgagcgatcgcttcgcattgagtgcgaaaggctgccacatcttcgccccatatcgcgatgtatgaactagcgtaaggagagcattcatggggaaatttcctgacccgagactcatgaaacagactgaatggggcttggcgctaaaccaatccgctcgatagggtgagggtgccccaccctattggagccggcgcttaaccagtagaatgagagatagatgacaaggcgcagcaaagcatttaaatcgcaatcatttcccccaaccgcgaacgataatttacctcatataattctgcaagctctcatgaagacatcgaagggccaggctctcggttacactaagcaatttcaatttcacgtttgtcaactccatggctgaagtagttggagtagtatctagcgccatcacattcgcgacccttgcaatccaggtcgggaagtccgttcagacactgaaagactactgggatgcaatacgcgacgcacctgatgatctcaagtggctagtacgagagatcgaagtgttcggctccataatggctgatgtcgacgcggacctaacacgataccctcctgcattagccatgataaattgtcaacatgctttgcaaagcttgcaattctgcaaagaggccgtggatgccttgaacgcgctttgtgaggatctagtacaagatgtcgactcaaaaaataggttgcgcaggtcctatcaagctgtcaagatagtgctacgccaacggaaagttgagaagcacatttcaaaactacataatgtagtccgcctacttatgctatcacagcaatgctatacaaggtacctatccactcaagatatgacccatggatcggggctaatatatgcagagcactcattcaagtccaaccagatttaattgcggagagaataagagagcgtgatgttatttcctcaatgacagaaactataaaggctcattccgaatcgcacagtttgtcttctttattacttgcttatatttgattgagctaatatgtttggcagattgttgtttagacacaacgggaatgccagccggaacgtcgaaaagaatgacaaagagcgatgctcgaaaaagcagttctgtttggcgtctgagtttaccatactggatatcatctcaggttttggagatatgtggcatacaagcttctggcggatgggactttacgttccgaacttacactgaaattccttggaatgctggggttgacagattagtcagggaagggaagatagaaatgcttcggaatctttttgcctcagggcaactttcagctcttcaccgaaatggaaaccacactctgctccatgtaagtttccaatcactgaaaaattccgtcccccatatgcttaacgagcaataggatgcggtctgccgagacaggaatgaaaaggttgtggaatttcttcttaatgaaggggcagatccatttatcgaagattatccacgccggttgactccccttcgtcttgctctatggattggaaagctcgcaccatcgaatgaggactatccgcttttaccatatctacgtgttttactcaaaaattcaaaagacctcgtctatgggagtccccaagatgtggtcaacggggtactatccgagttttacggatcggatgaggaattcagatttttgcaacaacactgctgtccctggttctacaaaatgccgcaggcgacccgtgtggaggtggctgctcgaatttcattcgacgcttcaggtgcttgccatattcctactttgatccgtgctattcttggtacagaccctttggaagccaacgaacttcaaacgaaatgttatttgtctatgacttcgagagaaacgacgctcgctcattgtgtcgcaaaacaactaggcagagatctaactgccttgagtatgtgtcatcgaagacagcatcttgtccttccatatgagtaccagacattcgtgagatacttgtcagatgatcaccaaacaacccgacaaacctttcgcgactcatggagcaacctattcttcgatatcttgcgcgctggtatagatatccacctagttgttaaccacaaaactctatttctcgcatttatagagggaattcttgcgtggcaagtatctttttccaagtctattcaatgtccgcgcgttgatacgggagtcttgaattcagttgttagagcctggctaaaggatcttaaagctgctggggtgaaattggatcaatttggtacaaacgagtggtgcacttggagcaggggggatgttcaaagggattttgttggcgatgtattgcgtgtgactggaatgagctatggcacatcccctgatgactggtacatatggctgtcggaggcatctgatactttcgcggcggagttctggaccctgattgcccagccaattgtgacaacaccaggtgaatggccagaggaatagctttcaattcatcccataggaagacggccatctcatctaagtagagggcaggtttttcggctaagtgttcgcacagtgcttctagcaccgatggcgttatggttcgtcgccgtgtcatcgactctggctcttttattgcgagactttcactcgaagtgctctttgcagcttctcttccagcaccagccgccagtacgcacttggggtcaatactaggtcttcttcagtgtccttcacgacagccttattgttgagggtgacccgccattctataaagtagtggatacagcttggcggatcctcatcatagatcttgtctttctcccactcagattcctgaagcattggtaaagtattcggtcgagatcggcttgctggagtggtctcatcgtcgagaagcacggaaggggactacaaccagatcgcgtagcataagggcttcggaagtgtcccggcatatagtgaatcctgctcccattgttggaagtcttggggctgagagatgcagtcaacgtgatacgggctgtcactcatgtttaaacccaatcgaagctctggagatctgtgtcagcttacgtgaggaccagctatcagcagacgccatgaacgaatagaaacggcagtagcacgtagggccgatagggtaacagaaaaagaaccatacttagcctaccagggttagttctctacagcagtggcaatgccttcgtcatgggaggagatagatatgcacgaagaccatggagcgaaaggaaaaaaagctggaagtggatcaggccacatcgccggatctacccccgcccccgccttcccttcgagaacgttctgtggaaatttacggtattatacaatggctcatctgacgttgaaatcaaatacgttaagagatgccatacggctaaacaggggttgtttactgagtaacctattatggactagcgtggtttcgggtacgggccgagaaataatgcgtgtgttaccagaggggaatctgttttcgactcttactgtacggtaccagtatagctcgtacagtataaagagtttcgggaagtactgtagcttgtctctcggtactttcatcaggatttcgagcgcgtctagtgagttactgtgaccaatggcgggacgggccgcgatgcgaacccctgaaccgcccgactgtgacgaacgcgaagattcgccaccgcgactggcgagaccgaaacgcaccactcgaccaccgaacaactacgctcgtgagcaggaaattgacactgatcgacgaaagacgcgttcccagcaaaaggagagaattgagctaggagaccggcgtgacgaggtaacttcggacgacgccgcgaccgagcgcgaagagctcgacgtcggcggtttggtgagagagatcgccaaactcaggcgagagatcagactccgtgacgaaatacacaaggaagaaattcagagaaccagagaacagttcggtaccgccctcgcggaggtccgacacgagctacagtccctgacgaatagaaacacgacaccgcaatgccactctgagacgtgctctcagaacaaccacgatgcgatcctgcgcgaaatccagtccttacgcgaggaaatcagtgttcccgctgttgcaggctctccttcctacgcagatgtcgcgcgcactccgccgtccagttacccaagcaacatacggtcccttttaacgctgaacacgacacccaccacctttacggacacgctattttgcacgatagatacctcgaagatggcagaaaaagggacaaaatcgacctccgcaggctcggtcagagcagcggttgaggcagagatacagttaacagagggccacgcgcactggcgctgtcgcgctgttaccgttgacccgaaaaacgccaaccggatcaggatcgcctgccgggatgaggatgaacagcagctggtcaaaaaggttgcagaacagaaaatcggggcgggagctcgggtcctccgtgacgagctctacccgatcaaagtcgatagcgtcaacaagacctccgtgctagacgagagcggtgaggtccgaaccgaggctgcagcagcgtttagtgaggagaatgagaccaacgtagccaagatttcatggctgagcagaaaagagagcgagaaggcctacggttcaatggtggtttacctgaccaaacgcatcgacgcgcgaaggctcttggccgacggatttttccacgcggggggagaatctggtgtgactagtgtcttcgaacaccgaccgcgaccgacacaatgttacaactgccaagagataggccataaggcattccagtgcaagaacgcccagaaatgcgcgaaatgcgctacagagggccatcgccacagcgactgtatccaaccggttccaaagtgtgtaccgtgcggagggcctcacgaatcgtacagcaagaactgccggaagctctatccatcacgtcatgaataattctcttcgaataattcagctgaacgtgaggaagcagggtgcagtgcacgagagtttaatgaatgacgaagacactcaaaacgcggtggcgctagcgatccaggaaccccaagcgaggaggattcaaggccggctcttgaccactccaatggggcatcacaagtggacaaagatggtgccctctacctggagggaggggagatgggcgattcggagcatgctctgggtcaacaaagaagtcgaagcggagcaagtccctgtggagtctccagacatcacagcagcgatggtcaggctccccgagcgactgatctttatggcatcggtttacgttgaaggaggcaatatctcagccttggacgatgcgtgcaatcatttacacgatgcgatcacaaaagtacgacgagagacaggcgccgtggtggagattctgatggtaggggacttcaaccgacacgatcaactctggggtggagacgaggtgtcgctgggaagacaaggggaagcggatccgatcattgaccttatgaatgagtttgcgctcagtagcttgcttaaacgcggcaccaagacatggcacggcggcggacaaagtggagactgcgagtctaccatcgatctcgtcctagcttcagaaaatctgacggactccatgacaaaatgtgctttactcgagacagaccacggctctgatcactgcgccattgagtccgtgttcgacgcccagtggtcgggcccaaagcaccaagagcgacttttactgaagaatgcaccatggaaggagattaacgccaggattcagaacgctctagccatccttccgtcggagggcacggtacagcagaaaacggatcgactcatgttggcagtgtccgaagcggtacacgctttaaccccgagggcgaaaccatcaccacatgcgaagcgatggtggacagctgacctcactcaactccgtcatatatatacgcactggagaaaccgtgctcgctccgagcgacgggcggggcgaaaagtcccccggctcgaaacgatggcccaggatgcggccaaacaataccacgatgccattcgcaaacaaaagaagaagcactggaacgagtttctcgcagacaacgacaacatctggaaagccgccaagtacctcaagtcgggagacaatgccgcgttcgggaagattccgcagctcctcagagccgatggaaccactacgaacgatcacaaggagcaagcggaggaattgatatccaagtttttcccgcctttgccagagaacatcgacgaggaaggagtgagaccacaaagagcgcctgtggacatgccagccgtcactatggaggagatagagcggcaactgtcagcggccaagtcgtggaaggcacctggtgaagacggcctaccggcgatcgtttggaagatgacgtggccctcagtcaagcacagggtcctcgacctctttcaagcctcgctgcaagagggcacactgccaagacagtggagacaggccaagatcataccgctcaagaagccgaataaagatgactacaccattgcaaaggcatggagacctatctcactccttgcgacactcggaaagatactcgaatcggtgatcgcagagaggatctcgcacgcggtggagacgcatggactgccgccgggggagccactttggggctcgaaagcagcggtccgcagagcaagcactggtgttcctgcaggagcagatctatgcggcgtggcgcggccgacgagtgctgagcttgattagcttcgatgtcaagggagcctacaacggagtatgcaaagaacgactgatccagaggatgaaagcccgaggcataccggaggtcttgcttcgttgggttggggccttctgctcggaacgaacggcaaatatcctgatcaacgggcagttatctgagactcaaagcttgccacaagctgggctgccgcagggctcgcccctgtctccgattctatttctgtttttcaatgcagacctcgtgcaaagacagatcgacagccagggaggagcagtcgctttcgtggatgattttaccgcgtgggtgaccggtccgactgcgcagagtaaccgggaaggaattgaagccatcatcaacgaggcactcaactgggaaaagagaagcggagcgacatttgaggctgacaagacggctatcatacactttgctcccaagatgcgtaaattggaccatgagccattcaccatcaaggggcagacggtggtacccaaagaccacgttaagatcctgggtgtcttgatggacacgagacttaagtacaaggagcatatcgcgagagcagcgtccaagggtctcgaagcagcgatggagcttcggcgactccgaggcctctccccagcaaccgcgcgacagctattcgcatcgacagtagcaccagtagtggactacgcctccaatgtctggatgcacgcgtgcaaggataaagccatggggccgatcaaccgagtccaaagagtaggcgcgcaagccattgtggggacatttctcacagtcgcgactagtgtcgcagaggcggaggctcacatggctactgcacaacgtcgattttggaaacgagccgtgaaaatgtggacagacatccacaccttgccggaaaccaatcctcttcgccggtgtacagatcagatcagaaagttcagaagataccaccgctcaccactgtatcacgtagccgatacgctcaagcacatcgacatggagacattagaaacgatcaaccccttcacgctatccccgtgggcggaacgcgtacaaaccgacattgatgagcagcatgagtccctggccgaagcgggcgggtgcatgcaggtcgcggttagcagctctgcacgaaacgagctggtgggttttggagtggccatcgagaagcgaccacctcggaatcggaagcttaaacacaaagcgctatccatcaccttggctgtaagggcagagcagaatccattctctgcggaactggcagccatggcacatgtattgagcacggcgacgggactgaaagactacacgatcgcactgctcacaagcaacaaagcggcggttctcacactcaggaaccctcgacaacaatctggccaggagttcgtgtgtcggatatacaagttgattaaaaggttgcagagaaacggaaaccatgttcaagtccgctgggtttctgccagtgaagacaacaagctgctaggtctggctaaagaacaggctagagccgcgacacaagaagatgccctcttgcaagaacgcgccccgaggataaaatcaaccacgctgaatctcgcacggtctcaagcagtccccagaaataccctgccagcggacgtcggaaagcacgccaaacgagtagatgcagcactcccaggaaaacacacgcgacagctgtatgatcccttgtcatggaaggaagcgaccgtgctagcccaactccggacgggcatggcgagactgaatggatacctctatcgaatcaacgcggccgacacggatcagtgtgcgtgcggacaagctaaggaaactgtggagcacttcctctttcgatgtcggaagtggaccacacaccggacggatatgctacaatgtaccgacactcaccgaggaaatctgcccttttacctgggagggaagtcgccttccgacgatcaaaagtggacgccaaacttagaggcagtacgggcctcaatacgattcgccatagccacaggccgcctcgaggccacttaaccccgccgacgaacataaatcacccctctttcattctaatctaacccaccaaccacctcgtgctattcacggtggacgcgcttcaactgccgaagataggatgttgaacacttggagaagcgccttcaagccagtctactaaccaacttactaacccacgagcatccgctgcgacactgcatgctgagaatgacaaatacgccaaggtcttgtgtatgggctccaatgagtcacagaattgtatatactatgacatgtatagtagtttagcgatagttgccctttcggctcagccgccgggcgttaatgaattgtgtgtgtgtgtgtgtgtacggtaccaatacatgaagtgatattccggatctacagtgacgatgcataacttgagcaccctttggttaccaccttccaagagaaacacaccgcctaaccaaatagccttaaacaatcatgccgatcaactttttaaatattggtgaggctagagcgggcagtattagggtgttcaaacttatgcaccgtcactgtatatcagtggtatatcttggcattagagtccgagaaccgattgaagagtgtaggtagtgacaccagtttcgggaggcaatataactgttctacattaacttctcaggaattattcgtgaacatttcatggatagatacaatacagatgaagatctaatagggaaaacactgtatgtgtagatggacgcgaagagaaaaagagagagggagcgtgcaggcaaactatccgggttgtgatgcctcagacacccaggcatccaacattcttctggagagtgtgtaaaagattcattgaaattgtgcgatcatatacgatctcctgtaagtaaaagacattcttatagactaatattcctagagcatataaaggactcagacaaagttttcagcttagactcgccatctgtattctatgtttcatgatacaattgatttctgtctttgaaatatgtatgtagcactctcctatcttgggctttcaggaactttcttaagtcaaagcctataagctaacactttgctaatttaagccgccgtaaggaaggtaaagggacagaggacacaaaccctagaaacccagggctttctatcagcgtcaagctctcaacttttgctaaagcagcctttgcaatttctaggatattatcatctttagtggctagtttggaatgtatcctatcaatctctatatatttcaaggtcaatcctgtggactgagtaatagccatacccctgagtaccgccttaaggtgaacgaaaagtgagtccctaagaaatatacgattggagaaccaaagaagctgatcttcctttgctccatggaaggagagcttgatagtatttaggttggagagatgccgaagtgattctgtaaaagtatggatatccgtccgctcttttaagagtaaactctgagctcttgtaagttctttaaaatatcgaaatattgccttgtaggaaaattgctttcctcggagctcctaccggaaatcttcctgatctcttgtatactcctatagtgtataaatgcaagtagaaaaatagtcctaatatgggatcactgaaaggattagtaaggagctagatgaagagctgaaaaatcacatatatggatcgactaattctgatgtatcataatgaagtattctcacgcattgtgctaatgaagaaattgcgagctcttttagtttctttatccctttttctgtgaactcgactttgaatgtatggaagatatctgaggtgctgaccgatctgtatcttctatttatgagtgaaaacgatctcaaggagtagtaatcgagatcaatgataatcagtcttagtagctcgaaaggtagatccgtgaaaattgtcatgttactttgaagctaggagagccttgatataacttatcgaagggtgtaaagaaagattgtacctgccctagggtgaaataagtattaattctcgtgtagctgggactctgtggtaaaataatgtaggaaagagttgcgacactgtttctagtacaccggtctggctgctagagatttgccgctgatctttacaattgctctcccacccgggccgcgacactgtctcagagccgcggcaaaatttctatagagcttgacctggtttggttcatgcctacagtcgagcccgtcgatggatactggctattgaggacagaggtctgagctctgtagtcgatgcctgtaggtaatggataagagagcccaagaatcatgaggccaagaatcatgaggcgcctcggccgacctgagaattaaagcaacgagcttgtagtcggagaaatcatgaacggacctcaagtgcgtacctctactcggttgtcgtgactgtattttggaccgtgggcgaattactaggcaatggacggaggcctcagatgtagcgcgttatgggtctatccatacgtttttggacaagaaacgaaatcggatttaacctaaatagttgtaatatccaatgtgagcggaattttacctgccgttggtgactgggaccgttagtgtaataaggttctaattgagtggccgggattacccctttaggatcgccaggggtgtaaaactttaataaagctcggttcgggcggtttgatctgtcttagtgatatgcatgcatacggcttatgtcactatgattgagtctctttgaggatagggaaaagcccaggaagaaaaggaggtgaaagaaagatttatctcttatatttgatctactatctaacgtgctggggactggttggaggtaggacgttattgtaatgaaaggttcggaatgggccggtagcttctggtcctctatttaggtagtgatcttcgtttaggtagtgatcgctataaggctgcctgatctgtcctagtttttactttcggggaacacggaatgttgaacgccataactttgtctaccatgaactgactcgagatgtggtccctttgtatctagagatatatagagctatagatacagcacttgttttgggttgagacctttacttaggctagttactagtgatggaaaagaatattcttatataaacttggaggaaatgaaattgaggaacctggcgcagcatgtaaaatcctttgtctaatacctcagcccttggtggaaggtgtatctgtgatgattttgacattcgattcttctgatgaataaatagaggacctaaatagcctaccttgacctgcgttccctttagggggttgttgagataactggtctagagtagcctgaaggtcttgtacagcctgttcatgtgcgtggaggagagactgaagacaattgatcaactctcgctgacgttggttctctagtagaaaatgctctattgtttccttattatcgatatatccggactcctgcttgtattgactcaatcgctgtagctatgaattaacagctgggtacaacttattaagatgggactcgagcccttgtactttgtctctttctaaatgaaggctttgggataacacttgataggtttctgtggtatgacgtagtgaagcctcaagctgcgatttttgatgctgtatcctagaaagcgaccttttgtaatagatatgtaatttttgatatgccacggaattgctgttgatcctgagctccaagagcccctggtaatgctttgactactggtcttggtgtaacagcttctctaccaagacaaagacgtcattgttatattttgcggtgtttgtattgtcctagatttttgaaacagaatcagcaaatgttatatctactgtggataaaaagtcggctttactcgaagaatggcagtagtagatggcggagctaccactggattttgatattgggctttagaagatatgtcttgaagaattggcttggcctttatcatataataaagacctgagggctcgtttcctttattagtggctaaacaatgtagggtgtgacgatacacagctaaccatggtatttacagcattcagtgtcgcaggaattggtcggtgtcgcaagttgttttcagtgtcgtaagttgtttttagtgtcgcaagttgtcttcagtgttgtaagtcttttgtcgttttcagtgtcgtatcttgtttttactgtcgcacggagagactcgcaggtcttggcaagcgcggtgcgccatgggttggtgcgaggtggatatacggatgtgcacggcaacgaacgatattgcgtgccttatgacgcctgtaaatgaggcccaaaattccggctagttacactgtgtcggcctgattgataagtcaactgtaaatcatctcttcttttctaatattaagaaagtgatagtttggttgctatccttgtatctatcgataaaggcgttgctattgtgtatttatggagttattttcatttgtcgattctaactataacacttgtatattattggatgaaatcacgtggtgaaattaatctaaatctatatagctatagagtggggaacctaggtgggtattgaaatcgatgcactggcatatacgttgaggtatattttgtgtcgtaggtggtgtcatattgccctgttaattattacctctgcttgcgttaagaggtgatagagggcattgtcaatatcgtccttttaggaatggcattgcctcccgctgtaagcctcctttgatctctttaatatttctgtaccaacctaaagggcgaaactccttatctatggccctggttgtatttttatcaaatacaatgagtcgatatactggttaatgtctcgatcccatatctgaggagattactcccgcggaccattaaattctatgtcttggaggcatattgtccaacctcgagagactacagtcccggttgtaatgtgcaaagcgacaatcgctagatttcaagacccagttggaagaaactgcttataagatgggctatctcagagcagagcttcagtggcataaagagactaaatagatactcttgcagttctaagaatgggtatttgatatctttagctccctagaagacgctcttatataggcaaccgcgcgcctgcacgagtcggagtagtaatacctaatgctttggggatctaattctagaagtggagctgggggctgtttttgacttgtcaaatgtttcaggttatgggttggacttgaaggaatttgagctgtgggatctactgagtgctgtcttattgttatagtgttgggcttctttttatctcttctagagaatatcgacgtatattatagaaattgcaatgtgctaggtaatgctatatttcttgctgatggtagcgatttgccaagtcaccaaattccttcattaccatctattctcgccttatgaccttgagtagatacttattgacagttttgaacttgtcctctaagctttccgttccctgagataaattatctatcctgtcctttatactgtcgatgctctgctttatactgtccaagcggttccctatactgtccagacggcgttctatattgtcgaagcggctatttaggccttcgatattgttactcagcgtttgcgagagtgcgctaaattggcttatcgtactcgtaaatcgcttgagggtgatagatagggcttcatccgtatgcgagatagtttcaatctctcttgggccttgcggacgacttgaggataataatgcatcgacttggctgccattttgtcagccctagttgggacctatcttgggggaaggataccttatcctataatcgctcccgtcccggtacaggtctgtcatcggagcgaccctagacgcttcccggcacgctttagactcaaaaccgtcattccccatgatcacgtcctgctgctgaacgaaagcgctcaatacgttgtatgggtcaatgtctgcttgtgtgcaatgcatcgtttcgttggtgccaagataatgaaagggatcatacgaattatctgggacgtcgagtgctagcgacgcttcgtagttatgaccgtgcttgttactagatatgttcagggcgaggtacagaataaaaattggtctcggatgcggcagacggatcttatatctctctctgctctaagcgctggacttccaatgactaggacggggccaccaactgttgggtaatgggagcactttattggttatagtaccctgttgttgttatccctgttcgacttttgcctcttggacttggggaggcgagagtgggcctagacaaaagtacgtagtccgggatctataccagtaaatgggagccagggtgagaatggggtgagaacggggtgagaaggagattgtttggttatttactacaaatgtgaatgaattatcaccctagttatgaaataagtctgttatttgaaggagtaatatttacatataaatatctcgcaccatgagacatgagagaagtagattctttatctttatttcactatgcaaaacttgatagatattggctggcttgatgttggcgcccgggaagattccacgtttgtaatctaagataacggccggctgcgacgtgtaatctctgagttgtgtgactaagataggcaatatctattattatgtatattcctcggtgggaaaacgaagaatcacactcttcagcggctctaccctcttaataacataaaaaggtatgattctgaggctctaataaaattgcgatacgatgtcgcttctttataaagccggcggccagtattgctagctgatggtgatatcctgagcaccgacaaattgtaccctataaaaagacttgatgccggcgttggccatccagtctattggaacaactatttagcggctaaaatactactggtgttatagtcatagttgatatttgtctttacggatgtagtttgcatctttatcgacgatgttgcttgtcttgaaaaggtcgtgaactttcttgtcagctgtttgcagcttcgttcgatgtcctcattctcatcctagcatttactaagggcgatatttatttatagcctatcggtgataaaagaaaggggtgtgtctggtttaggattactttattggagaatctaagaaagcggatataatgatttatctgggttgttctctagctctatatatttatacctataggataataatttctctgatatcataggattctaataaatcaaagcgtctatcatagaataggtcgacgccatttcctttattcgataagaaaaccgagttcggccgaatgggacgcatttgatagcattatttcaagcagcgatccaatatattctagaggatatctcttatccgtttgatttcgtggaagctactaggaaggatcgccctgttagtttatacgcagagctacatttggcgtattatcttgagatcggccaccgcgccaatctcctactctccggattggccgccaccattttgtccgcgctttttatagaccactatgttcccgagatgcttggttggtcctatctcaactttttataggctgaagctgatattagatagctataaacccctgtatggtatttagaactttatattggtctattattattatagcgtattgcagttccaaggcactatagcctaatgtatatcccgccaaagaaagtgatctggttgagttttatttttcgcgcttatataagcgattctcggagaatgcagtctccttagcgaatttacgtaaagaagaactcaagtcctttagtggccagttatattgtatgcgaagcaattgtatttgtctagtctaccttctacgttctatataatatattctagcgtgtggatatatagtgtgcgaccgctgtatctagattttcggaagccctacctctgggctggagtattagttcacaattaagggctatctctattacctctactagaggccgttagtggtagatattcttccaccgactataagccctataatccttaccatcgatggtagtggagtaaggggggtgatcctgttggagttcctacttctggtataggaatatctacgcctgtgcgcgatataagatgtggtagatcttgtactcggcacaagtttaggtaagttagtaaccttatggtgtaaatatagtttttccagattaggaaacctaataaaggatattataggtggccttatcgcccttaggttattcgcaatgatataggatgttatgtattacttggagcgatttaataccttagcatgtcgtattttccataaaagacgtctctctatcttacctctactgcttcgctaggtatttggctttatatctatctttggggacatggccaaatgggtcaaatagctcctatataacagctactatgattcgcaggtcttcgatgccgccctaaaaagtgcctttagagagcgttgtcgtatttttagtgccacctgagaagatccaccaggaccacgatgctccggcccgaaggtcggggtagtaaccacgagcatttctagggatataagtacttttgtgataggtaacttcaacgtggcctatgactcaggggataaaaatggcaagttcgacgatcatatctgcctatgtttttactaatataactagacttccgaataatacgtctagatgatacttgaaatgaaccaactatgtggcgaatgtaggcctaagcttagcatataccctattttctatagttagtgctaactaaaatctagagtaagagctaccgccgcggctctgttataagtcgatctcatatattatttcgtgtgagtggggctgactattagatcacaagcttttttatgctagcggatctatagggaatcggttccttttaggatagtggactaaagtacaacttcgcgggagagattgcacactaggtcttgcactaaatctagcccacagccatagggtctacaagaatactgtcattgggtactagaaaagtgcagtctaataagcaaaccccgtatttccgccacatcttttgtaacagtttcgtacgttggggatttgatacgtggatattaaccatagagatagatagtgattagagaaaatggcgaagccgtctagataattctattaaaagtaacagttactgtctagatgtgcctttaggaaatataccttataccattgatactgtcgaggttatagaggactatcgcgatattatcatcctctatattagtagtggacgaatagcccgggatatggtaactacactacttatctctagattcttctttattgtcgacttattgctagaaaatactgtaactccattctggtattgcggatcagtgtattataaagggccggctcggatggtgatcttagctttagaaaatctctaccctaataggcttagctatatcttagattgtagattaattgataggtttaggggtctggatagtctctaccccttgtatagatactacagccgctccgttactttcttagcctgccatctagagtataaggtgaatatatatttccagaccagttctaaaaagcgctagaggattagcggcttcccagagagtatggcatcgtttatttcacgataaggcctacggtcttcgtttggttaagacaaccataggtatccctgccgataaccttgccagagctatgacgtgatccgaaatcccgtcaggggtaggagacgtaagcgcgaatcaagaggctccggagatgtttatcccaggaaacgtgcacttgtttaaatcaggatcaaacctagaatttatttatagcgtgttcgataaggaaactctcgggtataaatatgagtccttttttgtctatagcaaaaacttgtaatgtccatgacttataaaatttcgttaccccttttcttgttctaggttcttttactaaatgatattgaagtcatgggtggccccgatccttataggaactcctgagttaaattcgcaaggcggtcctatacattgaaagtcaaggcctatgagcttgctaagttctgcgatacggatatctatgtggttgtcaattatcagtgaggatcgtttgtctataacttagtcgaggatagatcatggccccctaatgataagaagctagtgagtaaaataatgcctaaagtggcttagggtttcggcgctatcaagctaagagactggtaggaatagtagtatcccaatctggaacgaatgaatttcagtaaaatggaaaatctgccagaaagcccggagagtaatttatcttggctcacttgatatttcgccactaggttggagtattttcgattattagaggatctctatagggacatggatctagcaaatgttgttgctgatgaagaggctctatagatcaagtctggtgaatgtgattaatagaatatacttccttttataatacgataaaatatctgctaagattttgtagttacttggaagatcctaccttcactgtttatttactaatttaatcaagcggaacgaaagttagtatagtatagaggggagaatagatggtgcgtaccctttgtgttagattatactttgcttttgtgaaaataagtcaagctctagttgatataatctcttgtgagctgttttagatgtcgtaggttttcttaaggaccaaaggctaccctctattttacagcctgcccagcttacaattgcgaatatggtaactcagtctcctagttatccggatactcaagtcgttggttcgacttacgagcccttcgaatccagttatatgcggatgatcatagaagtggacggaatttcctagtaagataacgttcttgctagtacagtacactggatacttcttgctggatatcttgtgatacctggaacgttcacatctctctaaaagtccgacaccatctataatagcctcgccgataatgaagcaggggagtggattttaaatactattcagaatcctcctcttctcgcaatggtatgtgtactgtttgtatcaggcttggctattatgagctggctgttctgggaatattggggaaattatatttggcttaccaatcgaatctttgtgtgagtatcatctatttattatacgagaactctcttaattatactagtcccatacttcttaatgccttagctggctttcttactacgattattagcctatatactgctcacgatggcgattggtctatcatggtacttttgactgtgattacctctggtctgtccgttgcctgctccctcattttgctatatatttataaatttggcaaactagagagattgaaacaagaacacaatctgatgtttcgcaactacgaacaccccctccatgtctgagagttattctttctctatatcatgttacaggatggatcgaaattagtttcaccacctgcacacggagaatctatctcggaccctctcttgaaacacactatacttattacagttactcttcccctgaacccgtgtcttggcagtaattcaatacacgtgtaaataatagcttaaaaatagcttctgtattagacctgtatggctcttaggcgtctagaacgtttaccctgcaaacaggccaaacacaaaggttgtctgctcttctcgtctggagatgtggccagaattcgaatcccactcccgtcaaccacgcacggtagtcttggcgccattttggaaaggaatagctggatgtggagggaccttgggcagggattagtgggagttccctaaaaaggtgcgacgagcgaccccatatgctcacccttgctcacccctctgctcagcgggcaggggaaataatttagggtgatatgcctggggaatggcaggtattaggagatgcacgtgaccttcgatcttgtaggagcctagcagaacatctgacctcagaaaaagatggcaaagaaatggcacaccttccctcggttatgttatgtaatcaccaactgggatccaatacttcttttacttgctgggcgaagcgatctcttcaaccgagaagggtcagacattttatccggaaaatgctggctggttacatgctcgatctgactttgggatcgggtcgtcccgtcctgggaacgccattaccggcccccacatggaagtagcctcgttacaaacaattcagtaagcggtgtggagaccagaaggcacacttgatctgcctggctgagcacgctagagtcacatgatgacgaggctgagggaattccccctcttttagttcgttggagtcctactgagatttccgtcatgaccaacattagaactttctaaaaacaaatactcctcagcgttttctgctagacgagatagtatttgacacatcgcttactactatatctcgcgcatccgggcattttgttagtcgagcttactacccaccatggctgagagttcccaatctcagccagagcaatcagtgtcagggcaggataaacccggtcccgacagaccaccatgccaaaagcgactccaacatgatgcatataccattggatgggtgtgcgccctcccaaaggaacaaaccgcagccagagccatgctagatgaagagcacgaacctctcccgatccctcgaaatgatcataactcgtacactcttggctcaatacgcggccacaacgtcgtcatagcctgtctgcccagcatgggaaccaaccctgccgcaaccgtcgcgacctctatgataaacacgttccaatcaatcaggttcgggcttatggttggggttggcggcggaattccgccaaaggtcaatctgggtgatgtagttgtcagtcaacctgttgctgactatcacggggtgatacaatgggatatggggaagctggaacgggatgggcggtttgtccacacgggctcgctaaaccgacccccgaatgcgctcctcaacgcgtcgaaccagctgaaaagtaatcatgagatgtacggatcacagataaatgagtacctgattgatatggaaaggaaatttccacggctagcgccaaaatatacgagatgtaagtgcctgcaagacccgttattggtatccgagagttcctggtctccgagggaagtctatttcctgtcttggttgtgggagccgataatcgcaattatcgcatatcttcttggttcatgggccattgatctggtaaacgaggagaatgtgcggttatcagatagggcagacggcgcaagggccccaagagaagtcagggtacaccatggcctgatcgcatccgggaacaaagtgattaaggatgccaaatcccgagacctccttgacaaaaaatacggcggacacttgctatgcgtggagatggaggcagccgggctcatgaatgacttcccatgtattgttatccgaggcatttgtgactatgcagactcgggaaaagaaaaaacctggcaagaatatgctgcagccgtggcggctgggtacgcaaaggaacttttgggatgtgtccagcccagtgttgttgacgctgaagattcagcaaaggccatattagaaaagggttagtgcctacctacctaaatctatcatatacagctgtctaagtaccaagaaatacccgagacgtataaactggagttcgagaaatattctgactgcaaatagtacatcaggggatcgaaagcgtacagcggacaacagctgcaacgagagctactactgattcaatcagatctgaccttcataccgataagatcaagcgctggctttgtgctccggatccatcgtcaaacatcagccatgccaggacgctccgccatgaggggactggcgagtggctgctcgaatcccccggtttccaagcgtggcgctcggggtcacgtcgacatttatggctgcacgggctcgcggggtgtggaaagtcggttcttagtgcgactgtgcttgataatctcacgaacggaaacgacggtcttatccttagcttcttctttgactttagtgacgccgcgaaacagacattggaaggcatgctacgctcgcttgctttccaactttacgacagcgggctggactctgccaatcatctcgatacttcgttccaaacacaccgagatggcagcgagcaacctacgacaaaggtgctctggggtgttgttttcaagatgcttgtagcccagaaaaaggtctctattgttctagacgcattggacgaatcaagaacaagggaagctgtactcaaatggatcaaggacatggtattaagcccagaattggtccatgtccagctccttcttaccggtcgacctgaatccgagtttctgcgcgacatcccccccttgatagggaggcaaaactgcctaccacttgacaagcaagctgtcaactccgatatccgatcgtgggtcacagcacaactttctcaacggagtgattttatacaaaagcccttgtctcagaaactcctggaagagatccggaaaaaggttggcgacggcgccgacgggatgtgagatattactgcttcggtcaatatatttatagcttactgacgacttcatcaggttcaggtgggcattttgtcagttagacagcctgggtcaatgtccttacgaggaagctatagaggaggctctcgaatctttgccacaggatcttgataagacgtacgagcgcatgtttgaaagcataccaacgaagcttaaaagtgacgctatacgactccttcagttccttgtgcactccaagcgacctctgacgctggccgaggttaaagaagtaatagcgacgaagattgaaaacgactcgcaagggttttacaagaaacgtcgattattttgcgagaatgaaattttggcttactgtcccagcttagtgacagttgtccatactgatgttgaagagttatatcttgcccatttttccgttaaggagtaccttctggaaaacgattgtttcaagactgtggctgccagcatttctatcacgaggacgtgcttggcgtatcttacagatataaacggtagcgaaagagagatgatgtagcattttccgatggcaagatatgcggccgaattctggacctgctatgctacgacggctgaggcccacgaggagattcttcaaataatagtcaggttcctagaagaggaagcgacatttcagcgatgggctcgtttgcattaggctgataggagttgggacaaaagccctggtgcgccgcgaggctctaggctctactatgcttgcttgggtgggcttgtggaacctatacggaatcttgttgacaagggagtagatgtcaacgcgcagggcggcatgtatggaaacgccctccaggctgcctccgagggaggccatcaagagattgtcaagctgcttttgaccaagggagcagatgtcaacgcgcagggcggtgactatagcaacgctctccaggctgcctctcatagaggccatcaagggattgtcaagctgcttttgaataagggagcagatgtcaacgcgcagagcggtgactatagcaacgctctccaggctgcctctaatggaggccatcaagagattgtcaagctgcttttgaccaagggagccgatgtcaacgcacagggcggcatgtatggaaacgctctccaggctgcctcctttagaggtcatcaagagattgtcgacctgcttttgaacaagggagcagatgtcaacgcacagggcggcatgaatggaaacgctctccaggctgcctcctttagaggtcatcaagagattgtcgacctgctccaaaggacaggcgctattacaatgccttcaccatagtccgcctctacggctcagaggagcctagccgagaaagcttccctcaaacactctggaccttccgatcacactttgtaaattcttctatgtcacttctactatgtatagtgttcctctatagcctagcttcaagcctcatcactattatcatctcgaaaattttcggtctccatattttgatacataactagtaagaatcccggatactgcgttttccaagtacagtaatagtccattttcgccccgatatatattgcatcagaaatccatatgttaaattaaggacactcccgctaggacccagacacaagatggaatcaagattgcactcaatctatacgacactcaaacaccgtcgacaatattcttagtctacctaagaaattgttacgtaaaacggatttgatcataagtgatgtctcgaaacaagtcggcgtcggctaatttgaaccagggctggaggttacccgaatactcaagttattaactcctcgaacattccatatttagcaaacgaacatgtgcaatgtcaatttgtagttaagttatatattctcgtatatcccaaacttcaggaccaatttctgccttgagtttgaacttcgaagaggtgttatcctgttgctgatcaccttactacacatgaagcgagaatattagctacatcgttcgacgctgtccttaccaaatatagggatcaacggagttgatgcaagaggagagtgtaccgtagcacaaagggcagacttgacgtgatgatgtgaaggcgtgtttcacgtaatttacaaactcgagacacgcataatacgtgctttcaatacaaaacggcatttgaaacgaggctaagcatgattccgattagcgtgttgagaaggagggttcgagaaagaatctgtgcgcgagcggtgaaactgatttcgatccgccctgtatcccgggggtaacggctaggaatgcgtaaaggataaggcatggcatcatattccctagtacaaactacattcaattaatagcaaaaagcttggtaataacgagagtcctgcaattttctgccttggctgcaagtgataaattagaaagagaaccagagtctcgcttaggtctccgtttcttgtgtcaaaaatccccagtgtatgattgtatccagataataaggtataagatactaagtccgactgtctgattccacttgctgaaagaatgtatgctatgtgttgttagcgtgagactaaatgatattgaatagtagcctaacctcaaatatatatgaatataatgatgagccaatatgctctataaagtgggttgtatacttcgacagcctacaggcagcttttctggggatgttttcgggattttttatatatccatgtgaatcacccagttgaagcaatagtgagctaacattttcacgattaagatctatagatgtggtactattattaattatgctgtccccaatatttgctagtgggcttagtgttctatctatataggataatgttgtgtaccacttacctatcttaatagctctattggagtatagaatgatattattgcacttgacgcccctgtgggctatgtagagctgcttgtggatgtatttaaggcccctaagaacacttctgtagatgcttgccagatctttctcacttaattctaaggtgggagttaagccgacttgtgtaagattgatagcgaaaccatggtaattgtaaataaagtgagtagatatgctattatagaaagcctctaccaggcccactacattttcatataacgcaacttgcagtttggagaagctagcgccctatctgccggcgtctcttcttttaattaagacggttgagtacctaaagtagttgctaaggcttagctatctgtaactagcctgattgatcttctaattcaaagaatacttttgggaaggatgcctaaggtggggtaaaccatacctagatagggttttaatatcaagatcttagtagaaagtgtgatggaaaaacttatatcttaggaatatgcctattgtagctgagactttccaatttgtagctaggatcattcttagcggtagctgttaggaaggaactatttaacccgttaggttgagatatctttaccatagtaagattggctaaggcttttttttctcccaccgatggcaaagagggcatgctggcctgctttatctttattataatagctctccagcagatataggccatttgcctagggtgtaagcgaattatattttgtccggggttatcgatgatttccgaagccatagtggggatgagctagtgagtactgtggtaaggttaatttcacgtttatccttaagaactaggctaaagctctaggcgctcgaaaacagcagaattgcacagacgcaagtagggtcgcggaaacaaaagtacagctgcagatataaaagtagagccgcagatataagagtagagttgcagacacgaaagtagagtcgcgggcacgaaagtagagccgcagatataagagtggagtcgcagacacgaaagtagaatcgcggacacgaaagtagaatcgcggacacgaaagtagcgtcgcggactttctccacttttcgccccacaaaaagctgacaggcactagcccaagctagcaccattacaacttagggttatagggatttgattatgtacttgattttctaccaatcctaactggctaaggcccgctgtattatggttcttatataccgctaggaaagaagcaaataggaagataaagacctataaatccgaccctagtatatgctaaaagtagatgaataagtttctgggcttttcactgaaatgacttattttgctatcacttgttttctaacgataccggaggtaatctacggtgtagtcctcggtcttatggctctcttatttgcattgtactgtcttacattatatatattctcattcttattaacctctcctttcttgtcttcttgtgttcgaccgtttctattgtgctatgtgatttatgcccgatcctactggcatttcgccggtcttggaagtacattaagaacctattcattgttgatagttctttattttgccggcactggtgtctgcaatattgtgcgggtctattccgtttaagatgctagtaagagggtagcgaagctctcactcattaacttatttctaatgtttttgggcggtggttacgagtttagcgcttgtcttcttggagtttccctccattcctatggattcctttatcgattatttgcgcttgtagctctatttgaagctctagcttatattataatcgttgctcgatcaagggcgatatcttaggcgaacgagatgcaattctatggtctcctagtacgttttcttagtgctcctaaaatgtagatggatactgaaattagcaaggccgctagtatgtttttggctttggtaatattgctattagtgaagaaaagggtttatgaagtattccttgtcacctacattggatgtgcggtgacgatgatctacggagtgtggcagtatatccggttggctgaagggaatttttgggtattcctactagtgttcgcatgcaccctggttattataggggttttgcagctaattcgtattatctattgtaatgtggtgataggaagaagctatatatgaatgaatctgcaaccctatatgggtgatattgctcgaatgatactattattgcctagaccgtaggtcgtgcgcgccggttaacgtattaacctaggagttccttctgtgggtatcttttatattttttaatcatacccttttgctattagctggtgggagaatgatgttaatggctgggcggttttaatcttaatcttgcttcgtcctcgttccggtttcatgaagagactcttcgatcgcattgagctaaatagagaatgtagggcctggattgatggcccttttggtctgtcatctgttagttagagattaaactgtaatgtcggcgactatagatatgttttcatgattgctaccggtatcggcattgcggctcagttgctatatattaaggagcttctcgatggccatgaaaaggctcaagtatgtatataggtaatctcgcttgtctggtagttagatagggttggtgattatgagagcgtatgagacctactctagaccctcgttaggtaagataatggatacgttcgtgtctatttctatattggcgataccatctacttacgctgagtagatgctttatgtctcaatttacgatctactacgtgcttacttagaggatgaaattcagtatattggtgagaatgggctgatagatgtacgtagcggacgtgtcagctgggaaaagcagcttgatatagagataggaaattaaatagggaaaatgattgtcctaggtaagccctgttctctccctttattatgaaacgagttcttatcttaaatcagtatgtgtataagtacaaactcggtataatatcaggaacttggtcaggtcacgtgtagataagaatgtcgagctattcgaacctgagttccagccttggggttaaactggaagcttacgcgccttccttaggctgtgagaaaacgaaacgaatataaagacgctagagaatagggtaatgtataatattaggtattgcgaaagtgtagagaaggaattcccatgaatatatagttactttgttggccaaaatctaagtacttaaatacggtggaatagaaaagagtgttctttaatttagtctcttagctaaaatactggatttgtataaaatcacttatattgagaaaatttaccgaccggctaccttcaaccatatttagctgtacgtccggtgcctaacacgtcaataaatgctggagatatgtgggtaatttagccgatcgtaactttaaagtatttactaaatctccaccctgtgatactaaaaatatatccgcgaatgcagggtgcctaaggcgagtattagtcatcgaaatataatccttaaatatataaataaggacagcacttcggatataaagtgttaatattatatttctacttttacaactagtttagaatggcatccaatttgaatcgggagaagcgcgaaacttaatttcctaagaaactgtggcccgataatggaagtatcgttaaggaaagtaccgaaatcgagaaacctaatgagaaattggtctaaaataattatgcgtatcgacttggggtccctattattctaactgaaaatattaacagcttatcaactgtcaaagtagaatcaccggtacagtaccatctatcttataacattgatcaggtaggcctaggcgtgatagggcttaaagatactgagaacctacctacctactttcttaagtagtgtagcatttaaaatacccacgcttttagacgactttaatctgttatacaccaaaacttggtgtgtttgatagaaggcttttaatctggagggaagttctatatcgtatacgaatattatcatttggctattagccttggttgtgtagtaacgaatgttcgcttcagtgaagtagatatagtaactatctgtaaggagatccttagaggggttatttttatctactacgagttgaagacctcttgtcccttgttagattgtagtaatatacttctcacattgaaaggcgaagtcaagataggtataggacttgatgaatatgatgaccaactctgaccattagatagtaaatataggggagtgtttaatgaagaggagatcgggcgacggcattaaagaagacattgaggctattgggtctatcgtgactttattaagtgaccgaccaacttatataggcgaccctaagtaaggcctgggtattctgtctctttctaagttggcgcagtcgtttgttgagaaggcgaatacttctagttctgtagaggatctactaaaggtcagtattatttaaactgaagatgtgaatatataataatagatcgaaaggaagagtttctttatctggtaaacctagggggatgttggagtttaaagcgttattactactaggcatttcctttaggaatctgcattggcaaacgtgttaatgacgtttaccttgacgggatgtgttggatataatataccctaataaattagctattaggaatatgaggagctaagaagaatattaattactacgttcgcaaatctctatctgtcggggctactaaatgtgcaaacgaaatagaacttcgtctgtcgggactataattaaagggatagaaagctaaaaaaatatttgtggtgctatttttgtgtcctacattgttcaccaggaggattatccacggcatgaaggggtctatattctgtacttcgtattctgacatggacatacaactatagtggtgagccgccgtacttgcaatctagactcctgtgctccgattagttcacctgactatacggcttataagcatctatccggtatgttccaagcatggaaggcgatgttgagcgctatactaagataaaagatagtggggcgatacgaggcctgtcggaatttattataggcaaatctgggggtaaagcatctgtcgcagtacctactaggtgtgctatgtagtacgccactatggtgtcgtcaactactgccgctgtctgcttagaggcgtaatcctttagataagagtgaggctcattattagactgaaagggggtgtaacagtgcagataagtggcggatggagtaatatcctctatgagatgaaaaattgattgaagaataagaaaatagttttattccttataactccttatcaggtgccgtgtcctgatgacgctttcccgatcgaatgtctgtaaaatctgcctttctctttcctgtatgaatatcatagtctagaacgtaatcacggagtttatctaatgaaatcgtcccttccatgtcatttccatgacttggattgtctattttcctgataagtattaaccgttcttttaaagctgctttatataccttgttcatatccggagtgcctattccatactcattaatcactataaagagatgattacttgctagatcttgtaagactgctcgtaggttgaatccatcccctaagaagaatttgtaatagacttgtgattcgaataggtataaaacgatcacttcttgatgtgattgataccacgttgaaaggatcttaggtaccttatttcgaacggataggtagtttttcgtttctattggttgagacgtttcctcgaaactagctgccaacggtggagcatcatgatcgggagttccacttgggtgattagctaactctattggcttactggtatcttcctctactaactctggtccggagtttattgagggctggggtgcttccgaaggcgatggattcacgggttgaacttgtagatgccactcttcaaaatctatattagtattgatagatcctagcgcggtcttagtaagccttatgagactttggatagggctagcttgtcgtttatctaagattggctgaaaaaatgaacttttgccgaagaacgacctgataatgtcttttaccacgccgagtgacgttatatattctgacggtggctggttgggaccaaagatttgattgtaaaaaatgtttctgcgctgctacagatactcgtctcgtgttgggctgttaaattggtggcttgcttcgagttctgggttatttgttgtgaattgggctgtactattgtcctccgctagatacctaggaaggttctgtaatatgctctgaagtctatttgatatcgattgtacctttcgctctttgtatttgtagaactcctccctactaagagattcgaaaaagccttgtgctatatgttgccctagatttctgcttcgaagctgcctaatttggtccgactcaaagcctaatcgcgaagctaatatagtaagcttacttaggcttatatctatagtggaacattcaaattgttgacgaaaatttcttatgcggcctccttggtggacgaaatgcctgtaagcaaaaagctaaagctgtagtatagatacaacgaacgggtattcagtttgttgtattgttgtgaatttgtgttctgttgtctggactttaaggagacctccagttccgataagattccattgagtaagtataacttttcgaaggttttgtttgaattttagaggatagagacagtggagcgctcttgctggtctcttaataaacagtgtatcttggataagcgtagtaagggataatattctcctaggtgtttggagaaggcgactcttaaggacttccctgtattgagttgctctaagaagaggaaatatcttttttgaatccataagatcggtgatacgttttcggtctgccacagcgatgctaggtattaatcctttaatatgggatatggaatccgagtcgataagctatctgtcctaagatttaagaaattttgtctatatttctaggactatgtatagataatggtttagtatctaggaagttagctatgtgcgaggtatgcgattatcaaatatacctctgggcattttaggcctaacatcctggtgatttgtgaagattgtagtggcttctatagcctaacgtatggtaataactcgtctaaaatacgacgctgttgatcgtcatgttgtaagcgttgtatttgtttatgacagtcttcggaaccaagtctagtctaccatttctgctcctgagtagggttttgtgaaatttggtatgacctgagtgtacgatatatttcgctgacagtgaagcttatactttgtgtcgattcttcgtgtaattgggcgagtgtatcgattgagatatctataacgttcttagtctctattcgatatttttcaatgctgccctaccatttagataaagatcaaccagccatgtagtttctccaaatctctcgctagcttttagacgatgtttcctgtatacacaagtaatgatatcctctccttctaataggagatttggctgattttttggatcgataagtgcttctggggtgagatttgattttgcaagtgcttttcttaggacctcctagttaatagtcgcggcaactctgtgctcaggctctaggttaccatagccttcgatttcaaatatcctaaaaagtttctccacatttttctcggcgatctcttgggttcccgtgaggttatactctttatatctaagatgctgtaactttatgattgcgtatccctaataacattgtagccgttgaagggcgagggtgtttgttcggtgaccaagaaggttctcgcttgcttccattctcttcttattttgctttaaatgaaagaggagaaaaatcttgacgaagatggaaaggagcgccataataattttaaatgtacctacaacactcaaacccgtgtcgcgctttgccgactccagcgggcnnnnnnnnnnnnnnnnnnnnnnnnnnnnnnnnnnnnnnnnnnnnnnnnnnnnnnnnnnnnnnnnnnnnnnnnnnnnnnnnnnnnnnnnnnnnnnnnnnnnnnnnnnnnnnnnnnnnnnnnnnnnnnnnnnnnnnnnnnnnnnnnnnnnnnnnnnnnnnnnnnnnnnnnnnnnnnnnnnnnnnnnnnnnnnnnnnnnnnnnnnnnnnnnnnnnnnnnnnnnnnnnnnnnnnnnnnnnnnnnnnnnnnnnnnnnnnnnnnnnnnnnnnnnnnnnnnnnnnnnnnnnnnnnnnnnnnnnnnnnnnnnnnnnnnnnnnnnnnnnnnnnnnnnnnnnnnnnnnnnnnnnnnnnnnnnnnnnnnnnnnnnnnnnnnnnnnnnnnnnnnnnnnnnnnnnnnnnnnnnnnnnnnnnnnnnnnnnnnnnnnnnnnnnnnnnnnnnnnnnnnnnnnnnnnnnnnnnnnnnnnnnnnnnnnnnnnnnnnnnnnnnnnnnnnnnnnnnnnnnnnnnnnnnnnnnnnnnnnnnnnnnnnnnnnnnnnnnnnnnnnnnnnnnnnnnnnnnnnnnnnnnnnnnnnnnnnnnnnnnnnnnnnnnnnnnnnnnnnnnnnnnnnnnnnnnnnnnnnnnnnnnnnnnnnnnnnnnnnnnnnnnnnnnnnnnnnnnnnnnnnnnnnnnnnnnnnnnnnnnnnnnnnnnnnnnnnnnnnnnnnnnnnnnnnnnnnnnnnnnnnnnnnnnnnnnnnnnnnnnnnnnnnnnnnnnnnnnnnnnnnnnnnnnnnnntctagtgcgtccctactctccagtgtgtccctactctccagtgtgtccctactctctagctcctgactaccgcgtctactcgccgatagacttggaaaaatgcgacaaataaccagagtgctgaaaataccctatcatggttagtctgcccccgaacccccattcttagcagtgttccagtacagtggtaaataacttagagtagcgtctgtattagactactgtactgtagtaaggtctacaaggattcaagttgcttagtggtactccagtcagagatatggaattcacatgtataaaagtgcagaacagatacgtactacagtacgttgcgaaaccggtgcaaccgccttcactcttcgagtgtttctctaggcgcaccgccaagataccctagaacatatgaggaatggtcccggaatatcaatattccgctagcagtctcgttactatcatttcctttcattaaatacgatgccttgtctcacaactgtattggtaattcttgagcagattcaaataggccaaacaccagagcaggggtttgtctcgtgaatctggtgaatctcccacatcctttgtcgacttgcgaatgtccctcgttgaacagaagatcacccacgggcagtagttcattattggatagaaatgtaacgttgcactatatctgtctataaaactttcgaatctttgaaagcctggagtttttggtgaacacgcacgcttgtttcttataaattctggactttcaatcattggacctcaagaaccgggaggagatgtatatacatatattgcacattgggtccgacactaatccctgcagtttataacacaggacctaattattagtctacgaatttctttcgttattcgtagagatatttgcattagaaggcagcccctgcctaaggcccgggccgaaaaaataggaaagcggagagcgagcaaactatttgcctgatggctagattaagatttatcaagcgaatcagacggggtattcaatatttcatgaagtcaccctactcccgcttgctccactggaatgtaggacatgatcgagatgacgtcacaacagtacgtacagccttagaaaggcaggaaagaatttaacagtcaattggctagcaatgtaaacttctgtaacaaaacgtgcgaacgatcagttttttcggtatacaatttcgaggtctgcgcgcagagcatgctcgtgctagagctcatgagggcccgtcacagtgctatttccttccctcaatagattgacatgatggagagcgaacttcgtgacaatatttgcgcacagcagttagcagatgtgctcccggtcggcgtggcgatcgtcaacgcgcacgacgagattgtcttcgccaaccgacgctttcatgagcttacgaggagccaccaaccaataggactggactgcctctcgcagtcggtccacgcagacgattatgagcatatagcccaggcatataatgctgcggtatatacgaagatggcgacccggagagaataccgggcttttgggggagcggaggaatggcgagggctgtcgctgacaccactaaacgacgacgatttgaagcagttcgagctaaacggtgacggcggtctgatttgtgtcattagtgatatcacaccggagaagacagcagagatattgcagaggaagattgcgaatgatgccaaagagcggaagcagcaacaggaacgctttatagatatgataagccatgaagtgcgcaatccgctctctgcgatcctgcattgtgcggaggatattatggatattttgcaggatggagcgcaggacgatgggaaagagaagatggccaagattgccgaagccacagagacgataaatctctgcgttgcacaccagaaaaaaatcattgacgatgtgttggtttactccaagctagatgcgtcgatgctgaagctagccccacaagaagtccagccaaagtcgcatgttgcaacgctgctgagcatatttcgccctgagctgcgcaagcagcagatcgaattcgagtaccttcttgacacgtcttacgcagattgcgacctcgactgggtcgtcgccgatctcgacaagattggccaggtattagtcaatcttgtctctaacgccataaaattcactgccgaatctcaaagtaagaggaatattcgggtctctatgggagctgcgaaagtccgaccgccatcatacccgccaaatatcgtctttttcgagccgaacgaagctgctttgaagcttgattgtaccggaggccctgaatggggccatggccagactgtgtatatcatggtcgctgtgaaggacaatgggatcggaataagtgatcagcatcagaagctgctattcgagcgcttcaagcaagctaccccgcgcacggacagggtgtatgggggctatggcctgggccttaacatcagccgcagactgtgccacatgcatggaggtgagattggtgttagctccaaggaaggcgagggtagcacctttggattttatttcactgtccgacggtgtcccgatacagacaacgccaaggtggacagagagtctcctgttgacaaactgtgccatcaggttcgggagctcgacagtaaaatcccggacatcagaagagacacgtccatggcaaatttttctgaagaaccgccaataaagcacgtcgatgaggtcgcgatcggcactgagagtgacgaccgaagagagcactcagcgaagctgtcagaagccgctatacgagataacagccctgcaatagatcggcgcatgtcgaacatcgacaaattttcacccaaacaagagcccaaggctataacagaaatgtctaaactggaggaaccacaacgcattctatttgtcgaagataacgtcatcaaccagcgggttcttgcgcgcaagcttaagacagcgggatttgaggtcaccacggccaacaatgggcaggaagcccttgacgcgtggaagcacgattcatttgactgcattctcatggaccaggaaatgcctgttatggacggaagttcggcggcgcgagagattcgggcgctggagaaggacaatggaacgcatacccccatattaggggtcaccgccaacgtgcggcagaaccagcaggcagatatgctggatgcgggcatggatggagttgtacagaagccgtacaagatgcaggatttatgtgacaggatccgtcacttggttgccgcaagagtcggtggaggacactcgcagagtcatcgcacatcatagtcgaggccatctagtttcgggggaaatgcaaagcacaagtaaaggaataacatcggatgtccctttatgtgccaatatccacatttaggactacgaataaaattccgccgagaaaccacaaccaatcataatatacaatcgcttacggatgtgccttgtcaaacatttcgagttgcaggtactactgtaattacctagattcgtaatgtcggactttcggcaccgttgacacgaaggatgttggccagtatattttgtcttctgttcactttataattattgttgttgttctattttatgttttattttgctatatttaagtgtcacatgcccggctgacttttcttctagaaatgaaacagtcgaaattcggtccccgttgaatatcaattttatccaagttcaaagggtgtgtagcatagatatccatgactgggagggtcgggcctctgaacagcaatcggtcctcatttgacccaaaggtttacggatcactgttaagctctaggtatgttatagcaacgagtgacttgcctagtagtctaagatccctacttcaggagttggaagcggacctctcatcatagtctattagctatcactcgaggtttccgagcttctttatcaggtggtttctctaggacgctgtccagatatgagtcgagctaactaattattatgccggtaaaagacgggaagctgttagggaggggtaagcgaggtgtcaggtgtatgtattaaatttacaaatgaatacatttcgaaaatcatttatgtacagaacgtgcgtatgattacatacgcagctcccggtataactccaaatatggactagcgtttcctggcgtaaggagcaggaaagtcaatcgaagagtgaggtggttgcaccggtttcgggacgtactgtacagaacttagactcatgacagtgttcttatgccaattcctcctataacctaatatctgacaatcttgcccttagtcggattttctgatccgccccgccttgagaactcgaaatgagactaatatataccaacaccaccaaatagatgaacacacaagcccctattatgttgcatagattcgttgatgcgttggcattcgcgagaagtaacctaaaggtcccactcctgctttgcctaaataacacgtcttttaaatatgaaatgatccttcttcttgtagatgaactctcgctgatccttcgatgacagaaggttggtttcctctaagcaatttgtgcatagtgtattgatgttgatgcgccgcttagcagggagtaaatacgaccaaacgcaaacaaaataggatccaggctcgtttcctgtgaatttgatcttcatgcgatgggaatcaatatcatgacaagacacgcaaaaccaggtgacagttcccttcattctaggcgatgttagcatgtatagtatttgctagatattatcaaaacttacgttcaagcctaacggactttgggatacgtgatctaagattaatgcagaagaatacctgccttcatatgtctaaatcaggctgtagactaaaaaatcatcaaactgtacgagcaatttataggatagcgctaatacttgagtttatagtgcgattcctagagcagtaatcctaatctacctgagtaccatgccgctacagataggtatatgatggtccgtgtcacgatcccacatatctgtctagacaaagctacatatcagggggtagggatgcaagctggcttaggagctaaaattaagtcaggaattagtgggacctcgatttaaaaagtgtgttgtaaagcatgtcgcaaagcgtgtcgtaaagtgtgtcgcaaagcgtgtcgcaaagcgtgtcgcaaagcgtgcnnnnnnnnnnnnnnnnnnnnnnnnnnnnnnnnnnnnnnnnnnnnnnnnnnnnnnnnnnnnnnnnnnnnnnnnnnnnnnnnnnnnnnnnnnnnnnnnnnnnnnnnnnnnnnnnnnnnnnnnnnnnnnnnnnnnnnnnnnnnnnnnnnnnnnnnnnnnnnnnnnnnnnnnnnnnnnnnnnnnnnnnnnnnnnnnnnnnnnnnnnnnnnnnnnnnnnnnnnnnnnnnnnnnnnnnnnnnnnnnnnnnnnnnnnnnnnnnnnnnnnnnnnnnnnnnnnnnnnnnnnnnnnnnnnnnnnnnnnnnnnnnnnnnnnnnnnnnnnnnnnnnnnnnnnnnnnnnnnnnnnnnnnnnnnnnnnnnnnnnnnnnnnnnnnnnnnnnnnnnnnnnnnnnnnnnnnnnnnnnnnnnnnnnnnnnnnnnnnnnnnnnnnnnnnnnnnnnnnnnnnnnnnnnnnnnnnnnnnnnnnnnnnnnnnnnnnnnnnnnnnnnnnnnnnnnnnnnnnnnnnnnnnnnnnnnnnnnnnnnnnnnnnnnnnnnnnnnnnnnnnnnnnnnnnnnnnnnnnnnnnnnnnnnnnnnnnnnnnnnnnnnnnnnnnnnnnnnnnnnnnnnnnnnnnnnnnnnnnnnnnnnnnnnnnnnnnnnnnnnnnnnnnnnnnnnnnnnnnnnnnnnnnnnnnnnnnnnnnnnnnnnnnnnngagctgggaaagtccgcccgccatcatccccgccaaatatcgtctttttcgagccgaacgaagctgctttgaagcttgattgtaccggaggccctgaatggggccatggccagactgtgtatatcatggtcgctgtgaaggacaatgggatcggaataagtgatcagcatcagaagctgctattcgagcgcttcaagcaagctaccccgcgcacggacagggtgtatgggggctatggcctgggccttaacatcagccgcagactgtgccacatgcatggaggtgagattggtgttagctccaaggaaggcgagggtagcacctttggattttatttcactgtccgacggtgtcccgatacagacaacgccaaggtggacagagagtctcctgttgacaaactgtgccatcaggttcgggagctcgacagtaaaatcccggacatcagaagagacacgtccatggcaaatttttctgaagaaccgccaataaagcacgtcgatgaggtcgcgatcggcactgagagtgacgaccgaagagagcactcagcgaagctgtcagaagccgctatacgagataacagccctgcaatagatcggcgcatgtcgaacatcgacaaattttcacccaaacaagagcccaaggctataacagaaatgtctaaactggaggaaccacaacgcattctatttgtcgaagataacgtcatcaaccagcgggttcttgcgcgcaagcttaagacagcgggatttgaggtcaccacggccaacaatgggcaggaagcccttgacgcgtggaagcacgattcatttgactgcattctcatggaccaggaaatgcctgttatggacggaagttcggcggcgcgagagattcgggcgctggagaaggacaatggaacgcatacccccatattaggggtcaccgccaacgtgcggcagaaccagcaggcagatatgctggatgcgggcatggatggagttgtacagaagccgtacaagatgcaggatttatgtgacaggatccgtcacttggttgccgcaagagtcggtggaggacactcgcagagtcatcgcacatcatagtcgaggccatctagtttcgggggaaatgcaaagcacaagtaaaggaataacatcggatgtccctttatgtgccaatatccacatttaggactacgaataaaattccgccgagaaaccacaaccaatcataatatacaatcgcttacggatgtgccttgtcaaacatttcgagttgcaggtactactgtaattacctagattcgtaatgtcggactttcggcaccgttgacacgaaggatgttggccagtatattttgtcttctgttcactttataattattgttgttgttctattttatgttttattttgctatatttaagtgtcacatgcccggctgacttttcttctagaaatgaaacagtcgaaattcggtccccgttgaatatcaattttatccaagttcaaagggtgtgtagcatagatatccatgactgggagggtcgggcctctgaacagcaatcggtcctcatttgacccaaaggtttacggatcactgttaagctctaggtatgttatagcaacgagtgacttgcctagtagtctaagatccctacttcaggagttggaagcggacctctcatcatagtctattagctatcactcgaggtttccgagcttctttatcaggtggtttctctaggacgctgtccagatatgagtcgagctaactaattattatgccggtaaaagacgggaagctgttagggaggggtaagcgaggtgtcaggtgtatgtattaaatttacaaatgaatacatttcgaaaatcatttatgtacagaacgtgcgtatgattacatacgcagctcccggtataactccaaatatggactagcgtttcctggcgtaaggagcaggaaagtcaatcgaagagtgaggtggttgcaccggtttcgggacgtactgtacagaacttagactcatgacagtgttcttatgccaattcctcctataacctaatatctgacaatcttgcccttagtcggattttctgatccgccccgccttgagaactcgaaatgagactaatatataccaacaccaccaaatagatgaacacacaagcccccattatgttgcacagattcgttgatgcgttggcattcgcgagaagtaacccaaaggtcccactcctgctttgcccaaacaacacgtctttcaaatatgatttgatccttcttcttgtagatgaactctcgctgatccttcgatgacagaaggttggtttcctctaagcaatttgtgtatagtgtattgatgttgatgcgccgcttagtagggagtaaatacgaccaaatgtaaataaaataggatctaggctcgtttcctgtgaatttgatcttcatgcgatgggaattaatatcatgataagacacgtaaaaccaggtgacagttccctttattctaggcgatgttagtatgtatagtatttgctagatattattaaaacttacgtttaagcctaacggactttggaatatgtgatctaagattaatgcagaagaatacctgcctttatatgtctaaatcaggctgtagactaaaaaatcatcaaactatacaagcaatttataggatagcgctaatacttgagtttatagtgcgattcctagagcagtaatcctaatctacctgagtaccatgccgctacagataggtatatgatggtccgtgtcacgatcccacatatctgtctagacaaagctacatatcagggggtagggatgcaagctggcttaggagctaaaattaagtcaggaattagtgggacctcgatttaaaaagtgtgttgtaaagcatgtcgcaaagcgtgtcgtaaagtgtgtcgcaaagcgtgtcgcaaagcgtgtcgcaaagcgtgtcgcaaagcgtgtcgcaaagtgtgttgcaaagcgtgtcgcaaagtgtgtcgcaagtgttgcgtgtgtattgccacggtttttatcacagtgtatcaggagatgtgtggacatttaaattcgcagatatgccgcacaaaatcgtcgcttttcacaatagcttaaggctggagataccaatccgtctatcatccttcaatccttataaatattggaaatatgaccttctctatattcctacttcttactagcgtctatatacgcgctgccttaggtggtagtctcacggttatcgattatgatcgcgaatgcgtggtatggtctgatgataactatggctgcacgggatatttatcatcttttggcctccttgatggagacgattgttctggtgtgtaatggttctaccgatatactattagtactgatgaaaccctagatctaagcatggttatatatggtatccgtaaggactactctaagctcgatataggcgtatacagcagcacgaaagacaacatcatacctattgcatagatagatataaacgaaaatgggatggttaaattctataaccaaaatgaagacgagatagggtgtacattggataacggatttaaggttggcagcttgtgtattgcttccgacctgtctttaccgtctttatcggcggctttatcggaatctgcaccttctacatcggcatcgtccttatcggtatctttatcagaatcgtctttatcggtatcgtctctattatccacttcagtatcatcaagtgaaatatctagctgtactaactctggataagatgattatcgggtgactatgcaaatggccttgtcccttagaatatcatttatgatatagctcatcctcccgctcttggattgaacgattactcttactttcttttcctacttagatagaaccgcgttacctgaccctatagtgtacagagaaaagatcgatagtatatagatctctttggatatggttttgcctaccgggttttctatatcactagcgtgaatacgaaagagacttcccttactttttgcttctctataaatgttatagcagttgagcctagtgacctcgttttataaaaccgggttttgcaagtggatgcgcttgattggtgtagactgtcgatctggtaattaggaaatgagactaatatataccaacaccaccaaatagatgaatacataagcccctattatgttgcatagattcgttgatgcgttggcattcgcgagaagtaacctaaaggtcccactcctgctttgcctaaataacacgtcttttaaatatgaaatgatccttcttcttgtagatgaactctcgctgatccttcgatgacagaaggttggtttcctctaagcaatttgtgcatagtgtattgatgttgatgcgccgcttagcagggagtaaatacgaccaaacgcaaacaaaataggatccaggctcgtttcctgtgaatttgatcttcatgcgatgggaatcaatatcatgacaagacacgcaaaaccaggtgacagttcccttcattctaggcgatgttagcatgtatagtatttgctagatattatcaaaacttacgttcaagcctaacggactttgggatacgtgatctaagattaatgcagaagaatacctgccttcatatgtctaaatcaggctgtagactaaaaaatcatcaaactgtacgagcaatttataggacagcgccaatacttgagtttatagtgcgactcctagagcagtaaccccaatccacctgagcaccatgccgccacagacaggtagatgatggtccgtgtcaagaccccacatatctgtctagacaaagctacgtatcaggggtagggacgcaagctggcttaggagctaagattaagtcaggaattagtgggacctcgattcaaaaagtgtgtcgcaaagcatgtcgcaaagcgtgtcgtaaagcgtgtcgtaaagcgtgtcgcaaagcgtgtcgcaaagcgtgtcgcaaagcgtgtcgcaaagcgtgtcgcaaagtgtgttgcaaagcgtgtcgcaaagtgtgtcgcaagtgttgcgtgtgtattgccacggtttttatcacagtgtatcaggagatgtgtggacatttaaattcgcagatatgccgcacaaattcgtcgcttttcacaatagcttaaggctggagataccaatccgtctatcatccttcaatccttataaatattggaaatatgaccttctctatattcctacttcttactagcgtctatatacgcgctgccttaggtggtagtctcacggttatcgattatgatcgcgaatgcgtggtatggtctgatgataactatggctgcacgggatatttatcatcttttggcctccttgatggagacgattgttctggtgtgtaatggttctaccgatatactattagtactgatgaaaccctagatctaagcatggttatatatggtatccgtaaggactactctaagctcgatataggcgtatacagcagcacgaaagacaacatcatacctattgcatagatagatataaacgaaaatgggatggttaaattctataaccaaaatgaagacgagatagggtgtacattggataacggatttaaggttggcagcttgtgtattgcttccgacctgtctttaccgtctttatcggcggctttatcggaatctgcaccttctacatcggcatcgtccttatcggtatctttatcagaatcgtctttatcggtatcgtctctattatccacttcagtatcatcaagtgaaatatctagctgtactaactctggataagatgattatcgggtgactatgcaaatggccttgtcccttagaatatcatttatgatatagctcatcctcccgctcttggattgaacgattactcttactttcttttcctacttagatagaaccgcgttacctgaccctatagtgtacagagaaaagatcgatagtatatagatctctttggatatggttttgcctaccgggttttctatatcactagcgtgaatacgaaagagacttcccttactttttgcttctctataaatgttatagcagttgagcctagtgacctcgttttataaaaccgggttttgcaagtggatgcgcttgattggtgtagactgtcgatctggtaattaggtgatgcccgggcaattactttactcgcaaaatgctagataggattagagcgagatttagcacttaggcctgtacttcacatatcactaagggcctgcctagaaacggtgaatgagcctgtgaaatgcatacttatagagccatgccgaggggatgtacatctaagggtgtcaggtgctactggtctatacgctgtgatttttatacggacatccccctagatgcccatccagatcgcatgatgatcgcacagttacacggaagaataccccagttgagatcctcgggctagctagaacgtgttgttgccctctccttgtgcgattgtcaaacacaatagaacagactagcgtatcttggcactagggttcgagaatccgtcgtggttgtatgagcctcgctctgtgctctaaaacttgtcacctgtaaatgaagcaaagcgcgcatcagaaggctgcaagatttgagagcttgttcactaaaggcttctttctgtacggtgaaagactaccaatctttgaacccccgacggctgtgagacatatcttttcctcgaccacacttccggcaccttacttgtaaaaccgacattggtcttctaaggccacaattctcacagtctcctaatagcggagcatcgaaaaatgtgtcgagcatttctttcacaaattctggcacttgggcggcgattgaatcgtacttcgcgcggacggatgtgtctcgtaaatggaaccccagtttgtctctcgacaagcaaacggcgaactctttgagccccttggagttgctgaatggcgagaaaaagacatcgggtattgaatcaagatactcaaaggggtcaaagtgacctacagttctgttcaaatatttccccatggccgcgtcgcaaagctcggggatgcagtatttatcgcccaaagcaaacaattgtgcatgtaatcgaagagcagatattgacaacagcggcacattaggtgagacatctgtcggactatcatcaatgagctctgaataatcacctgtgtataagtagtccagcatctttttaacgacgggaatcgattcatccgtcatctggtacgtagaatctgctgcttcctatatttaaactatgtgagatacgaagagagaaagactggcttaagagataacttgccctaaaattcccggtgcaagcggcccgaaagataggagattgcgaacatagtatgactttatgcacgccgaaatcgactccatcacacataattttgaaatcggtgtaatcgcctctttcgcgacatcttctgttatttagtaaagttttgcaatgtcgcggagaacgtactctgaaaccctattaatgatgcgctgaggttgtgatgacgaagtgttggacatggctgcgttaacagtatttggaagtaaaataggcaagattgtcagaaagagctagttgggatttgaatacttttgaaatgttttgaacgtcagactgtagcaaaccagagtccgagtatccagtaaatgtcttgacgtagtaccttctgttatgacgtcaaataacgcaacacaaatctgtgttgtctttcactgagccaaacgtgtttgatgaatcttacaaagcttttttatcatgtgactcaatattacaatacatttcgatatcttgaaattgtctaaatcaagaatagactagcgagtgtcagaattgagtttgggaaagaatttaaagagagtaacgtagtgaaactgatttcgagcgcgtctgtacctgcagactactcataaacctgctttttatatatttcgaaaatttttcaaaaaggcccttccaaacagagaggttgggaaaatcgtacactttgtagtgtcttgtcatgccagtacgtggtgtcaacaataaaggtatagagaagtcgagaaccccctctagagaagacggatgacggtgggttgctatcgtcattatctggagtgaggatagtacactactgacgtccactatcacaaaatcctatgaatgaaactctcccagattcgtgtcccaaggcaagtgtagtcccgttaatcgctgaacaccaaggccgatattcaggaggaagccacagcacctttctgcggtgaagggttatccactgacgattcagaataaatatcccggcttccccttgagataaattggaggtatgattatcacatccggactgtgttttaaggtatcccagattggtgctcagatgtgaatcatctcggacaaattccaggttggtgaccagcccgtgagcacccaaactctgtcgcagcgcgcctgtggcagtgtcccagagcctgactgtcttatcatctgagctagacgccaggagtcggccgttagaggagaatgcaacagatcggacattgtctgaatggccggagaggacctgttgcagcgcgcctgtggcggtatcccagagcctgaccgtcctatcctttgatccagacgccagatatcggccgtctagggagaatgtcacacaacggacttcatctgaatggccatcgagaatctgctgccacgcacctatagcgacattccacagcctgactgttttatcacttgagctggacgctaggagtcggccgtcaggggagaataccacagaccagactatacctaaatgacccttaagaatctgctgccgtgcacctgtggcggtatcccagagcctgactgtctcatcatttgagctggatgctagaattcggccatctggggagaacgccacagactggacacaacgtgaatgacccttaagggtctgaagtagggcgcccgtagcggtatcccatagcctaactgttttgtcgcttgagccggacgcgaggagctggccgtctggggagaatactattgaccagacccaatctgagtgaccatcgtgggtttgctgccccgtatccgtagtggtatcccatagcctgactgtcttatcttttgacccggacaccaggattctaccgtcgggagagaatgctacagactggacacaatgtgaatgaccctcaagagcctgctgcagcacacccgtggcggtatcccacagccggaccaacctatcgtttgagccggacgccaggagtcggccgtctggggagaatgtcacagatgcgacccaatctggataccatattgaatctgaatggccatcgagagatcgtcggagcgcgcctgtgtctgtgtcccagagcttgagtgtctcgtctcttgagccagacgccaggagcagacagtctggggagaatgcaatagaatggacggagtctaaatggcccctaagagtctgctgcagcgcgcctgtagcggtatcccagagtttgatagtcctatcatttgatccagacgccagatgttggccgtttgaggagaatgtaacagaccggacattgtctgtatggccgtaaagggtctgctgtagcgtgcctaaggtggtatcccagagcctgactgtcccatcatttgatccggacgctagatgtcgcccatcaggggagaatgccacggactggacagactcggaatagagatcgaaagtctgctgtagctcacccgtagcgatattccatagtcgaaccgttttatcacttgagccggatgctaggagtcggccgtcaggggagaatgccacagactggacagacttggaatggccatccagggtctgctccagaacacccgtggcggtatcccacagcctgaccgttttatcactggagccggatgcgaggattcggccgtctggggagaatgccacagattggacgcactcggaatggccctcgagagtctgcatttctgagctccagatttcctcaacctttggaaacctacatatccaactagggagctcttcttcaaattccctccgaactattgccaatctaggtgcaaatagaagtcctgagtgataaagttggaggggcgcctcatcagcgatatgtctatttttaaggacaaaccgcctgccatcatgtagaagattggttattttataatcctagtcaccctatattagtaacggcatgtaatcacataggttttcctatagaaactgacacttatcaccagctgtaattgatcgatgatctccagaacttctgacacgacgcctagaatgctcattgcttccatccaatgtatgaaatgctcccggagaaacaagaagatctcctctattgcagcagcaaaattcttactctgtgccagatgatgtacccaatagcgacaggaatattgtagctctggtggtaaatgctgatggatagacatggcatcgatctcagttctttgtattccatagcccttcaggttgcaaatattcttctttaagcgaccacgcatggtgataagacagcgcatggcgatatccatatgtttcttgggctcgtccacaaggaatctgctctgggatcggaccaagaaatttcggaaggacaaatgtaaaatcctaacaggcagatctcgtttcttcggaacgcttagaacagattgaaataaatccaatcgattgctgattaggtctggctcaagcccaagaaatagggagagcgcattgattgaaagtggaacagcgagaagaatgatgacaccgactatttcctggaactcttgcaagagctgctgctgttctgactcattattgtcttggtcatctatcagttgcgtcagaattggcaggtacgtcttgtccattttagcggcatatttagcttggtcctttaaaagctctgtgaggcgtgatgcaggttcccattttagattctcgatgtatcggcacacggtggcggcacaaatgaacagtggaactgacatcttaactaattgttggatgatgtcatcgcccggccagtctcgacacatatttctatcgtgtctgatcttcgcaaatctgtccttcaggaatagatatatatcgtgttctgtcgcttttctggagatatcatgaagaaccaggtcctggtaatcatggttcgtgatctctaaaaagccgaggcgaatcgacagttcaggtcggcttgtcaagaatacacgaaggcgaatcgcgggtgccttttgtagaagaggcaataatctgattatggttcgtacatcttgatcatgttcacattcgtccaaggcatcgatcactatcacagcggtatgaggagattgctcatcgagttgcttaaggtcaagcaatggttgaaggagtattttatcaaactgctctcttagcgattttgaagcaatgtctgggtcgccatggagtgccttctgcagaccagcacttagcccagagaaatttagcactagttgccttgcgagtgttgggagaagttttgtggcatttcctcgatcaccttcaccccttttgaagaaaaagcttgctcctaggtgtttggtctccttgagcgattttgccacagttcgagatatcgtggatttcccagttccagccattccatttaaccaaaagaggcactttgtgttgggtgaaaaggcccattcttttatctgttgaagaagttcggtcctcgtgccttgcagacactcatcttcatgttgatctgggtatgagttgtattcggccccacgcgcaaagggtaacttgtcaagaaccatcttctgattggcatgctcaccatgctgaatcattcctgtgatgagcgttctagatatcgtttaatcaaatatcctcaagcaagagcatgttatccgcaaaaacatacgtctgatcaagctgcaacgacaagttaaaggacgacttgtatctttcaagattctgaacaatagcctccatctctgtgtgtttcaagggccacttcaaggctcgaagtcccatttttctcatcagcgtctttcccctccctggatcaagtttcgcttctaaggctcggaggtcggagaggcaatcggtaatattactgactagacgcgaagaagcaggtagggtgttgctgtggctttgaagtaatttatcgaggtcttgcagaattccttggacgcccgaaatcgccctttgtaatttattaatctcgtctcgtgcattgtttacctcctggatgtagcccccgcaaatcttcaccaggcttcccgtcagttgaatgaccgcgacaacgctcgctgccgatgaaagtaaatccatatggaagaacgggcggcataaatgcttaatttcatgtaagtagggaaacagatcactatagcgtgggattgtgttcggtttggtagtttgggctttccggcgagaggtaaaagaggggtaggttaggcggcgggagcgaggctgtgatccagggtgcagtttcgagtgctaagttgaccgaccaatcacgaattcagccgttgacgcactccaaaaggccacattgggataacccgttcttatttctagtggatactggctggctgttggctcaaatgtcggcccgaaccgaaccgaaccaaacccgtctcgccagacccatctccgttgcgatgcgcctctggccacctcatcaacttttcggtcgaccgcgcgacatattatggcgccccaacttgcacccccgccatcccgtcgaggtacaaggtgggcttttcgagcaggtgatcgcacaacgcctcaagcatgactggagtgatgctacgttgtcgtccacctttattaagcggtgctttgacgctgccaaacatccgtatattggaagagattctcaggatggtactcttatttgcagccagcagcctgcgccatctgcggtatggacagctccccaccgtgtatcatgtcataaataagatcttgctttgagggagctaggtttggggtcatcttgattcaaccactggtgattgatcgttaagataccctccgtcgggtggttattttgaaggtgggtgagacgtattgattcacacgcaaatacatacttgaaagtagtaacctacgtaagaagcaatacacgcccaactgacaggggtactccggaaaaattcccaaacagagactagcgggtcttggcattgtgattcgagaaacaacgaaagagtgtagcggtggcaccagtttcgggacgcactgtatgccgtcaaaaattactaacggacatctgagatgacatatattgcaaggctttatgtatgggctctgaggagacacagtactatatatattatgacatgtatagtagatcagagatagttgccctttcggcttagccgccgggcgttaataaataaattgtgtgtgtgtatgccgtcaatctaacatcgtttaatcgtgtaataaatggccaggaatgacgatgagtgcaactccaagcaccatcgtttcttgtaatcgtcattatcaacgatataaccctgtcaatgctctgcgcctagtcgtcatccaagtgtataaattccataaataaattgtctgcggaggttatatccgaatctttaaaactggttggcagagtgttggtgagaaaataatcctctaaactcggcaatgtttcattacttaaattcctaaaagtagttcctgcaggctctgactgaagctgccactttctttttcgtttaatacaatttgactggggctcttctatggaatgtatatcaaagaagtgccactggagatataagttattaatatacttcctttcttcgcaatatagatgagggcagaagactgtggctaaagagaccgctgaccctaagtgtttatcaatgtgattcagaagagttgattttgcaacctattgttaaaatctcttgtctggtttcttacttttatcgcctaggtagaatggacagaatcctagcgtaataagtgtggagcggaaagtcaaaagaccacattgggggttgaggttgtcgagatagtatttgtaatgattctcctaggaatcttcgttaaggaagagtttagtgtaaagataacaaaattaaacaaagctgtgctgtacgtgtcgataggcgcgcttttcgttcttatagcgctgctagtattatataccatttaaggattttcttcgatactgtagtatatgcttggctctcccttgtagtggaatgctgtcttcttgttaactttttgatctataatactcttcgggtatacttactctagtatagacttattgtatattggataacggccttccttaggggctatgccggggtagtaaatggcacgttctgtcgatatacaaatagtaactatatcttctaggcactgtcgactaagtttactatctagagttgccttctttaataaattcttgctgagacgggagcgctctggtagatatttcttatagatattgaaaagaggcgttagattgcgttcggagaagttgttcccagacacgtactcagtgtatgaagtatcctaccagcttttgataaagtctttcttctaggtgagcaatctctttgctttcttattatagagacgatcctgtttaaatataaggtccctattctcttctagtcttctagcaatctcctgcgttaagtgggtaattctctggttaatcttaataatttcatcgttagattcgaattgtgcggtcgtagctgtattaagttttagcggcacattcgagtctcggtgataagacatgctttgttccatatcgcggcatttgtagttagggtctaaattatagaataaggcttgtatatctaatgccttaagagaagactgatattttagataggtgttatgattctaatgattaagagcctggctataagtagcctgagaagccttggctaaaattccttagtaaaattgaggtgtaacggcataaatatacttacagttgatcttatttgcaatacctcctcgaattccatgtatatataactggtctttaaacctatcccgctgggccaaggtagtgaagttgtgctgtaatgaggagaaggttaacgccttcgttaggtcgggtccttaagcagtgacccttctgaagaatggtaaatcctttgtggtttcattctattctaaggtctatgactctcttctgttaggtggctttgcagtaagaaccttggtcacagtggtaagtcctttaaaggtaccatccgctatcctatagacgattacctagaaaataaaactcatcctaagcaccggatgctccctgaaccaattttttggtctaattttattatattagctatttctggatagaatgattatagctcgtaaactcacaaggtagtatcgtcgcgataacgccagcctttcaagaatttgggatcaattattacctaacgtatcagagaccccctttccttactctatttgagatgaaatgaaaggtgctgataattatcagttagatttgatataattaggaagcgtaatcgtcaagatataaaccctataatataagcatttatttgatttgcgataagtacttgatttaacgatagcccctgctcttgtacctgagctagcaaataaagagagagaacttgcggtctgtacgcgtgctctctcatgtatataattgtgacagttatttataaataggtgtcgaagtaggtaagctatgtcctttccgttgactaggaaccgctctctgggctttgtagggagcttatattccactatgagttcggttctaatatacttttgtttttgttagtagcgagctcctaaaaggataattgttacctcttatattaagaatgttgtccttaacttccttgggaagggatcgagaagtttctcgctcccacttcgatgtaaagctggtgaagtgattataagctgactgctaagacggaacctttttatacgatttgatataaaactctacgaaaagtttcaaaagttcaggagtcggaacaggcaggttaggaaaattcgggtctgtggactcgttacgggaaatcctccatctactaataattaggaaccaaaatcggcgaaatccgagcgaagcttacagtgcctaattgtcaactgtacggttatatttttctagcgtagcaggcgctagctcagggtggcacacagtattaccctctttttccttctcgtcttgatagtcacgtgtgaagccatgtgatatcgcacgtgcgagacgctcctggagtgctttcgggatattcttttcggagaacatgttttagctggtaaagagattcaaagaaaatcatggcagagtaagagaagcgcctcggggcttgactatttgtatttgtcttagggctaacatagatttggagtgagttggcccctatcacctcaagggtgagaattgtcaccccgttctcacctttctcacccagtctcaagtcttctcacccatatcacccgcactcaccctagagtgccgcttaggtgctgagggcacattgagtattggccgtgcagaatatgtggcttaagtacggctgagcggacgggaagccctgttttccacaccctatggtcgtatgtatcagatcgtgtttcgaggaggtttatagcgtactattgcaagggttggatgtgaggatgctaacaacaccacaatgcttgtcgctaattggagatccaatcagagtggtcgaggtcttgggcaatatggtattggtcgattaaaccggaaaattcatgcacgttgggcgatcctctgcagttcaaaatgagaaatcctcgagatactcgctagttggtacaacataattgtctgcgcgtcggcatataacagttacatatctcactcacacgatgaccacaatcctctttgttcctggtgcttggaccgctcggacgttctacgaaccatttctccaagctctcacggtcgctggctacgatgtccactacgcggggtacccctctgtagactcctcggacccgttggtcactgattgccaagccgacaccgatgctattacgactattctccagtctctcgtggaggatcagggcaaagatgttgtgctctttttgtattcctatggcggcatgcctggatccgccgcggctaccgggctagccaaagcgcagcgggctcaagagggcaaagcaggtggtgtgattggactgctgttcctgggcgctttcatcgtacccgagggtattagttgtgccggtgcccagggtggaatcctgcccccctgggtcttacacgatcaggtaagaggacctcctcgtccccactatagttatataatgcattttgctgacatgttgcagccctccgcgaatcttgctgtcgtggataaccccattaaaatcttcgctgccgatgttgatgcggtcttcgcccagtccctgaccgcaggactcagaccgcatgcgaccttagctttcaattcgccccagccccatccggcctgggcggacgaagcgttccgagggcgtttggcgttcatcgtcaccactgaggattgtgcggtgccaagggaggcgcaattcggcatgatggcctccacgcagcaggcgtggattgtcagggaagtggtgtccagtcattgcgcgccattcctgaatcggatcaacgagacggtggaacttactcgggagatcattggccaattcctataaagggaaacatactttcacttggggttaggttgctatgggcttttcgtgcaggtcaccaggctccgacaccaaatccaacaaccatgcaaactttgttgaattgcccgtctatatataccaagaaataaccgcttcacggtggacatatttccatagaaagggacattagaaataccttgagtagaaaatactgtcttcagttatcccgagttacgactacagtacgaagagagacatttaattccaaaccgtctgtacaatttatttcgtatcttcgtgcacctctaggtaatattcatttgcgaccgagactcatttctgagatgcctcttccatagccctcaaaaagcaagccttatcaataggccgcccattcttctggcttcctttccacgctcgtcgctggttgaccttccaagcagagtcactcttgtgtgcctcctttttcttttcatcaccgaggtctagcttcataatcaacagacgcaacgcccaattctctataccaccagctttctgttcggtctccataagcaggcgtagcagttcgatgtgcaattttctcaacacggccttcgtttgagagaatgccccccgagcagtgatctcctccagtatgtactgtttcatctcaggtgacagggtttctcccttttgggatcccttaaacacgcttgacaacgctgtgttggagaatcctggcgactgcattgataagatgattgggaaagatagcttcccttcgtcgagatcatcacagaagcccttgttttttgtgtactaaagcaacatgttagttaggatttgtgtttagaaacacagtgtggggatttgttacatcgtcgctttgaaggttctggtagtcatctcggatctggaaatgtcttccaagcaacgtcgcaaactgacttatatcaaggtccctaggatatattagcctgatcttattttcttgtgcgatgagcgttaaaatacctattcaccgtcgcctcggatctcatcagacgactaataagacggaataaaccaccagtctctgtgtaatggtcagtaaattggtgtataaagatggatgcgccaatacgtactgccgtcaaccatgctgatatactgcgcaggggtcggcacatgcgtatggtagctccagtggagatcgcgtccctgcccaagctgtaggttacgcatttcatctagcactgtcagttcgagaaatctcaagcaaatatgccgggataatctacctgtgtaaactaaaaccgcagacggggaaagcatctgtacgagatacaaggcttcgttcatgagatatgtcgcagtattgatggtttggccaacgccaaatatctgatgcgccactggccttccgcgtctgaggacacttccatcctggatgtcatcgagtctatttcgaggtcagtaaggaaaacaattgcaggttggaatgggcccggttacaataatgatgagttgtgtaggaagttaactgcaccctctatgatcaggagggacttcacgggcaccttgtaccatgagttcagagccgctatcattgtctgtctcacgttcttagaaggcagagagttgatgtaggtgtagggatttaacacgggctgtggatttctagttagcacttaggtctccttgtctccagcgactcttgcggatagaaacttacctcatcgattgtgggatacccagatgtgtacttggccaggacatcactctctgctgtgttgtctgaaatattgttagtctcgtttgccggattgaaaccaactgagatagcgtgttatactcacttgacttaggttcttggagttcaatctctttagtaccattaatctcttgttttgagtcacgaaggtgctcttcaggcgtgagaactcgcacagcctcgctgccaaacttctcaaggtggtctttatacggattccgttcaaccttgaagtaacgaggaacacacagactccaaacccagtttccagccattgaatgctcgagcagtttcagccagctgaggattgaatctgatggactagccgtcgccttgtactgttccttcaagtaacaaaatcgctcttcgtgggctcggatctccgcttggacaactgcctttgctgcgcagtgcgtcaggccttgtgtaactgcgacaatatgtaccgcattgactaatggcacctcgccattgcttttcacatgagcgtcgtattccttgtcccaagagaacaagtcatttaccaggcataattccgcatatgcgacgtagctcataggatcagcgattttttcttcctcgggggtgagtgtgatgcctgatccccatcggaaattataaagtgtccagcttggaataatcagattgagttctcaacttcggaatggggtgacatactctgctgctgcatcaacaattctgaactccaggtagtcatccagactgggaaattcaagactcctcacgtcctgtaccgaggcagtgaatgtttgccacgctttaaggaaaaattcgccgaacacgggatccaaacgcaggtactcggccgcaatcttggcctggacctcggatttgcgttgtgctttagctgaaaccctgttcgatacagaagtcatactgctctgattaatagcctggtgaagcattttgttttcgagcaacaactaaatcgcgcgtcagtttcttgatccgcatacatagaatgatttatcatacagcttcttgatcagcggcattatcggtttcatctaactcgatgttagttgcggcatatagagtgatttattcccacgtaccatcatgaaggaatgcatattccacagtgtaagcgacaagcgcaagtctttcgggtaggcagttaggcgcacacagtgaggtaaaattacccgcgtgtgcattgagattgccaaacttcgacccaacggcgtcaattccattgaggtctatgtggcattgtactgaaacatgatcggcaattatcgtttgtttgtgaatatatggggtaaagagagaggagtatgccggattattggcgtagatctcgggatcaatgctctccgcatacacgtcggctattgtttcgcccatgttcaatgttgctttgtgattcgagaaaataccgagctgcacgatgcacatgcaacagccgagggggcccgggtggtataaataatcgaattagaaaaagtaaaccacccttgctaagacaggtgcgctagtttagcccggcactataaacgtcctcttccgatgccggttcattcgtttctaccgtacgatatacgaagtacgcgcaagggaggctaccactttgcaccggacaagtcccacaataatcaacgtgtctagcagccaatgacaccaattggctccgccttgacacatacaacatgagtgagacaagaaccaactatgatctccactagaagtaaatctaaagcacgttttcatccgaggctcctatctcgatagaaactgagcaattgactcgcgcacaaattcgagtgacgatcatgtaccttttacgtctactcttgcctatttgagtgcgaatctaacttgttactatcaaggacagcacgccatgggggttatgccaagcgggatatccacagcgaaaggagcattgaaaatcataatctcggttgggggccgttacttttagtgcacttcgtgcaaacgggtcgcaccaataagaaacaagcacgttagtgcatcgtggagtcttttgctcgttatctgggctatttacaaccggcaggatcggagggacctttgcgaaacggccgacgccatgagccacgccttggccggcgcttgtacgctctaatttggcgagttacatggcgggaaatgtggagatggtggagatgagagtcgggaagattgaaagattcccttagtagcccagatggagtatggagcagtaaaaagtacatctgcgtctagacaagatcttcctcagggtttcctatctgagctgtcgctgcttttacgagttcccgaggtagaggagatgtcagcacgaggggtcagtcacgtgggaatgagatgcttagtgatttagactataccaagaagggattagcgtctagatatcgatttacggaggacggagtactccgtacaaaggtcatcattctgttcgatatagacaagtcaaaaggccagttcatgattcgatgaattatcaatagtaatcaaatcttcgccgagcgggagaccgacgtggattcgcccaaaaagatcaatcgatcaatggcagactcgtgctgccaagaggacttcaaggcatctttagtacctgcaagtgcttgtgagcgcacccacctagatgctatctgtgtcgcacgctcatcgccatcggatgatgcatcgtaaaggaccaaacatgaggacactatggcagcaatatgttgcaggatctccctgtcgcgccacaggagttcgtccctgttagtactctgtgtaatttcgagcagagcgtttagtcttccttccacagtaacgcattcctcggcgaacctcgattggcagcccttcaaaatatcctttgtccattcaaccaaaactgagcctgccgacttcttaccctgcaaccgtttgtcggtaagaactcgaataacatcctccgccataacactgactgtgccctcccagatggcattgacagtggtatctcggaaaatcttggcgatgttcagaataccgccatcttcattattttcgcagtacccaaccccgcccaggcattccatgcaggcccgaagtccatgaaccgcgttcacactaacagtggccttcaatgcgggtgttatcagacgcaggagagtggcagccttgacaggatcctgcgggataagtccagcagctttggtactgcggaccatggagtcccaattctgctccatggtaccctgcagtgcgaccccgaagaatgccaaatgcattgccgcggagtaattgactgtctcgtccgccatccaccgcacgtgctgcacattatcctgcaaaagcgctccacgcgtcttgcggacacgagtgtacgcccggcaaatggatagtccgcggccccaaccagctgctgatacacctgcgcagtagagtcgggtgatgttaagaacggtcgagatggcattgactcccttaccttcctctcccaccagccaaccacggacccccttcaattccaactccgccgtgggtagggacttggtgcccagcttgctcttcaaacgctggatacgaatgccgttcagctcgctcgcgtcactgttctttccggagcggcgccgcatgggtgcaaggaagaggctgagacccttctcggtctgcgcaagcagcatggccatgtcggagtcagtggcgctgctgaaccacttgaatccgtcgatgcgccacgggcccaactgcaacccatgagcatccacatctcgtccctgttcggcatctcgtgagatctcttctgccgtcaaccgccacgccagcgtctccgtttcccgaacatcactgccgcccgttctctccgtcatccattgtcctgttgtccaggcctcaccgggaatatctgatacaagacgtctgtatgcttcttgcaagaccgcgcggcggccgggctgatcaccgtccacgtcgtccagccgtgccgccaacaatttagccgctccgtccgtcatcgagccaggacaccccgtcatcgcagcactgggtgaccagacatggttcattgcgaactgttgcacgcgtcgattccattgttcattgctcttcttgtaggcgactgcaaccaagccctcctcttgtgcgatggctgtcagctttctccacccttctccggtgattaacgggtcgacacgattctggatgccgaaggtactaagtggtcggatgatgggctgattcacctcggcatcggtggccaagttcaggatagccggatccagtgcacgacgcgataggttgtggactgagacgccaacaggggattcccgcggcaggtagagattgagaattctcgcaagggctatatcatccgaagcggccagggagcttgagtttgctgacccatcgttgacgaaggtatatgctggaggaaccgtggggatggactgaaagaagccatccgtagacgatgaaggttttctgccggtcgagtgtaccatcatgcttgttcaatttgtatttgcggggaaataaagttggggtatcggtttacggcttgggtgcacgctatataagcaccggatagcgtccatcagtaccgaggttccccatgtgggactcgtttttgatatcctagttccaccggatatctgacttccaccggatgtaccttgaatcctattggtgagcgaggagctctgtccccacaacttgagtataccatatctattccaccggatataacccagctggcaattccagagtcagttccacgtagaacataaagtaaatcattgtcttcatatgcatgtgcaagatatttacttccaattcctcaattcgcaaccatgtcttcttgcactatctacaaccctgtgaaggactatactatacccaatacagacctactgtccctcgtctttggtgagaattctacattaatcgagacatacagtctctaattatgaatagaccaccccgacgtactagcaaaagatgataccatcctccatgtggaaggtgcagacagcagcaacagtatcaccaagtcacaatgccgcgagtacaccatgcgaatcgcccacattctgcgcgagaagtttgcgattggcgcccaaggtccagggatcgataccgtttgttgcatctcgaccggacaagttcttctcccctcgcttttctacggcgtgattgccgcgggcggggtgtacagtgcggctagctcgagcttcacggccggagagctggcacgacaggtgaaacacggagaatctcgactcattgttactagcaaggactgcatcaaagtttccttcaaagctgccgctgaatgtggaatcccactggatagggtgttggttctagatagttcacgtggacagagaagtcttcgagatggacacgggaaggaactgctccatgagtccaccggacagctggcttgggaggtgatttctgatcaacagatcctgcatgatagggccgcctgtctgatttacagcagcggaacaactggcgagcctaagggttagttgcgtcgctccttttgtggttcataactaatcaagacccaggcgttgaaattacacatgagaatctggtgtccgctgccgtcgtgaacctctacgcctaccgcgattacatatccagacaaaaagctcaaaccccagacttcacaccagaataccggacagtcgcacacctcccggcagcgcacatcgccggctgccagggctatttcctgcaaccggtgctatgcggcggaacagtgtactggatgtccaagtttgagccgaaaagctttctctggaactgtgcgacatatcgtcccacgttcctctttaccgtcccaccaatctaccagttactggtacaaagcccattggtgaatgatcaatttaagcatatgatccatgcggtatctggtgcggcgcccatgggaccggatttggtcgtgcgagcaaccaagacactgggatgtcccgtttcacaaacttggggtcttagtgagacaactggtagtgtcaccatctctccctgggacgaattcgagtctgatggaagtctctcgcctctgcttccgaatattcggctgcgcatcgttgacgaggccgagaatgatgtcgaagacggacaggagggagagttcatcgtccaaggtccaatggttacaaaggggtattggaaaaacgaagaagccacgcgagcgagcttcacagccgatggagcatggttcaagaccggcgacttgggattgcgacgaaatgggaggatcttcatcatcgaccggaagaaggtgagcgactatacctcaagcattgaagtaatttctgacagtttcggttgcacttcaggagatgatcaagtataagggtcttcaagtcgcaccagcagagttggaaggtcttttgctatcgcattcattaattcaggatgtcgctgtcattggagttccggatgtcaacatggcgggaaatgagcttccccgtgcgtatgtggtggctaatcagagcaaaatcacggaagatgccatcaaaagcttcattaaagataatcttgcctcgcataagcaattgaggggtggtgttatcttcgtacctgagattcccaagagcccgactggcaaaatccttcgaaaggagctgcgagctgctgcgatgggagccaaggcgaagctatgaagcggagccgaggttgtatatcacgtgacctcaaatcaatagacaattcctgtctactttcagacaaccgtcagtaaatattgtactcaatagcaaatagagttgaatataacaccgtcaatcatacataccttttaccagtacgaggagtagatccttggcatcctatgacataaacatttgacttccgagctccaccggatgtcagatccctcccaatatccaacccttgtattccgctgttatggcgccctccagggtccgatctgcctgtgcaagatgccgacggcaaaaactcaaggtcttcctttcttgtcatacatcacggattctacttactctttacagtgtgatgatacccgaccctgccagctgtgcattcgctccgatgcagaatgtacggatgttataaacaagcgacgaaggtgagtaggacgcaccatagcataatatatattctaataattatagaaaaaataccagagctcagtcacaaagcagaaagccgcctgagaatcgtccactgctcacggaaacggccccttcgcacgatcccagccccggtctacagacgcatgttgggcccggtggcaatcatgctacagatctggtcaccagccagcgagagcgagcccactcaacctttcatcatgcccaggaggtaagattatgtactgtcaagcttttcttctgctgctctaaccccatcagctttttcgcaatcatatgaccaccttgcgggactctgatgccattcctgacggggcccccgcaaacaagctgcctcaagttcaaggatcgagaataccaattttcgacataattgggatgcagctcccgtcgacacccgttactctggcattattagacgcatatctccaagcgaatcactggtacctttccatgtttcatgagcccagctttcgcgcacgtctggtcaccatccttcggactgagggtattctcccctgtgagaagtcatttttattgttattgctagctgtcttaattcttggagcccggttttctaatcacgataccctacattccctggactcacagtttaatcttcagcagtgcaaggcaacgtggatcaaggctgtggaggatcatatattctggattctaaaagaagccacgctagaatcaatcgcctgtgccgttctcatgtccattgagtaccttttagaacgcaagacgcagctctcctttaccatgtcaggactgggatcgcgagcggcgcaggcgatgagccttcatgacgaggccacgtgggaaccactagatttcattgaaatacaggtgcgccgacgagtttggtggtccatctacatggtcgatgtgtgagttgagcaactatttgtacacatacgaagcaacctaacacgttccagatatatcgcacaagcgtacgggaaaccatcagtcctcccaaccgtacagttcaacgtttgcgagccaaaagatctagatgatacgatggccacctgcccggggatcggatcatacgaggtacgagaagacggcacgttcaagcctgtgacgatattctcgtacaaccgctacaaagcacagctgtactcgattgccgatccaacggcgcatagtatacgtttacctcatatcaagcgcacctatgcccgtctcctggattgggaaaagaccgtcccacgagagctcaagcttggcagcttttcggaggatcagagcatgatcgatgaccctgctcggcgtgttttttccctgcaggcactaacgctacaggtgtcttatgactacaaacacctgatattgtttcgccctttccttctcagtaggaaatacctcagtgtccgattacacgatggcccgatcgaatcgcaagatagatccgataccacgatccgtgaccaattattcacttctgccttgcgcatgtcgagcatctgtcggtggcaaaatattttatctattcttgggaacaccacctctgccgttcaactctgtttccagtgcttcacagcgggtgtggtactggcgatgctggccttatctgaactgtcctccccacgactgtctgaatgcaagcaaggactggcccgtctcattaaatctctggaagtggcaggttcgggcagtcctttatcccgacaaagtgtcgatatcctgatggaagccatgcatcttatctcggccgaggaagtcaaggagctagtctccagggcgggcaaaccagcggaagatctacgcgatgttgtatcagactcagtcacatggtcggcggacagctgcggggcgagtgatgcgcagcatgcaatgcagccagatgcagtgcatgggccaggcatatgggcggagttggacttgacgccggatgaaagcgagccggaaatactcaactccatctctctataccaatcgcttgcgtctttgttctagccaatacctgtcatataacggtaatagcatggaatgcaggcctgtgtacaacactcatcacggacagcggacttcaacgatctctacatttttagtgcggtgggtcctaccgcgaggctacatctgggcatttgcatattgatgtgtaccttgttaatttatgatatctacataacgggcaacgttcaactgtttccgaggttgaaaggcctaccaattccaagacgatctagccctggacccgtgtgtgattacgtcagccggtgcgtgctcagttctacccgctgacaaaaagcggcaagagatgagcctaaaatggaaaacggaaggttttcttaggagggcccaaaacatgcacaacctgccttagtgtatgcatctcgacgagtttgtatagaacaaaacttgtcgaattattatcgtcggcccgatgccaatccgatacgattgtgtagtatcccattggtctacgtggtcaccctcgatactaactaaacatgcccaggagcctcacaagcattttccgaatctgaattgaagctcctacaagagttgtacgctgcgatatgcaatgttccggctgtttcagagatatattaatatttttcacatggaatcctcacggcagacccctgtcaccacggatacccacatcgcggtcgcgcaagccgttcgaatccttgcacaaaagtagcgccggggcacattggcttgggatccgaacaaaattacaattctgtggctaaacttccagtggggattcggaagtatgccacgtagcaatcgttagctcttctacggagtgctccgtactcggcatccaatcccagctagagcaattggtcaacattctcaattcggatttatacaatcataatcccttgtggtaggtgaattgtctctcaaactttagccgctcaattttcagcatcgagcacatcatcgccatgctattactgtggtttggcttcttttccttcatttttggggtggtgatctatcgactatatttccatcctctcagcaagttcccggggccgaaactagctgccctaacaagtctttatgaattttattacaatgtggtcctgggtggccggtatttgtgggagatagagagaatgcatgagaaatatggtaagaacattattcgagacactggatcatatgtcaatactaaacattttcgaggtcctattgtgcgcattactccccacgagcttcatgtggcagatccaaacttctatacggaaatctatgcaggccctaccaggaggcgggacaaagacccaagacttgtgcgactggcaggccaaccaacttccatgttcgcgactgttgatcatggcctgcacagttcgcgtcgagctatcctgaacagctatttctccaaaaagtcaatcgcaggcttagaagacatgatccagggcaaggtgcaaaagcttgtcaagcggctgagcatggcctgtgatcaaggcacagttgtaaagctggatgctgcgtcttcggctctgactgcggatattatctcggagtacgcgcatggtgtgagtcttgactacttggacgatgtcaatttcaataatgaagttgcggactccatattaagtcttgcgtctgtagttcatgtgttgaagttcttccctttccttttggatctttcaaagttcatccctgataaggtgcttgagaagctttggttccatgcagccaacattttgcgactacagaaactggttcgtgctcaagccgacgtcgcactccaaaatggaggtaaagtggatggtcaagcaacaatgttcggtgctctctgtgacccatccttgcctgtgcaggaaagaacattggatcggttgcaggacgaaggcttttcgttgattggtggaggcacggagactacaacaggaacattgaagattgtcatgttccacttgctcaatgagaaggcattacttctcaagctccgcgaggagctcgagcaatacccatctagcacatgggccgaccttgaaaaactgccctacatggtgagcaatgcaatatggtatgccaaggcgagactaatcaatgaaatttgttcagagaggaacgataaatgagggacttcggctctccggcgtcataactcgccttccccggcgtgcacccgatgaagccttggtatacaagcaatggacaattccaccaaacgtaagctcatatattctccgagatgaacaacactaacgcgcctcaaagtccctgatgagcacatcgtctcattttgttcacacaaattcggacctgttccctaatccgcttgcctttgaccctgagcgctggatccgggctgaagcggccggccaacgcctggagcatatgattgtcaccttcagcaagggctctaggcaatgcatgggtaaccagtaagataaactcacttcctcctggattctcaaacttaccagtgatctagtttggctttggcagagttgtacctggtcatttccacgctggtgcggagattcgatatggatctatatggggtgacggcagataacatcgtcacgcatcgggagtatggctttggcgttccaaaagaaagaggtgaaggattaagagttagtattacacgggttcgtgacccgtagtttgtatcgtttgacatatactctttcgtatatatatcgagagtgggcttatacgcgatcatgttaacactgggcacggctcaaaaaatgatattttatacaaatttcacgaccctgcacaaaagagaaaccaaagcaacaaccaagctataatcgcacatggtcagcacataaatctcaaagtaaccggacacatccactaagccacattctactcattttttatcaattctaggaccatcttcagactatttatacattgattgcattcgcttaaagcaaacacactcacactcgaacccacgaggctagcatcaatattcactaccataccactaatctatcaaaccgcaggcatggcaggacacagggcgtctgacgagttccgcgaggaacatgctaatttctggaccctcatgcagcaaattattcatggccttagaaacaactacccatcaaaccaggacaaagtcattggctggatgggccaactcaatctccaactctcgacccttcgacgagccggagagatgatggggttgagttatccacctagcgacgtcgtcctcgatgctccacctcagtacttcactgcccgcgctcagcgccatcaaaattacttcggtaccaactttgggtactcctgctggtatacccaaggccagctaggctacgccattgcagaccttctccaccagcgagatcacacccgtgtagccgaccagttggagcagttgctggcgagttggcaattgaccgagatgagagcatttcctcgccatctcactactcacaatcatgtcgagcacccggccgatatcgtgcatattgatggtccaccatactatacaccaggcgctgggcgcagcaagacagagactgggccagtccgtgtccatattactatgcctgctccaaccgatactatttacggcgtggcacagcagactcgccatcgccctgcaccataccttgaacgaggtgctcgcccgagacatcgtgggaatgctaggctaatcccgccgatgcctaagatggaccttcaactcccgaatatcatgcataatggcgatattcgccatgctccactgccgactcttcctgctgttcgttcctttttcactccatacagcattaccggacatgctctgcccggtataccaaatatgtctgtgccacccctacgtggtatgcagtacccgtctattgtgccagccccggatactggtgattcattgtctgttttgaatgcccatgtcggggagactttgaataaacacctgttctgtcgggatggcgttcgctgttgagatagtgggcaatctagctcgtttgagctttttaattggaccctgggtcaccacaatgcatgctttggtattgactaccactgagtttaagaactccggttgacttgtggttattgctaacgctgattttgattggtaggttcttatactcccttgtgctttgatcgactatggattgcgccctctcttttggaaaaaaataaaatgataatggcctgtatggaatcagaacgctttatacacacaagaaattgatgcctggaagagctagtcgccatagtcctccggggatgttcctgaataaatttcgggttatgtacttccaaagttaggagccttgagcgcaatagaatttatagcaggtattcactaaatatggatcttagtcggttaaattaaataactagagatagctttgcaacttctaccaatacgagcatattttcggtgtgaagtacaagatcgatgagcaataaacaggggttattaggctgttcagcgaatacggctttattcctgctcgtattcacatactccgtatatctgtgtagtatcgatctaaatagtaagtgacttccttggtataaagacaaggaaccttgtgcgccgtttcggttatggttagatcggtggattcctcaaccgggatctgaatggcttgtatattcttattcagacaatttgtgaatctctcaataacaaccttggtagtatacttgtctagtcaaaagtaaacagttggttaatatatgtttgtaaagtggtatgttggccagaaggattgcacctcctatacgaggtacatgtatataaccttgcaatatactatacaacatactatacatggcaccacatcagtccatcgccttccatcttgccactttccaaatgtgttgaacctcaacaagccagccaatcaggggccaggatcagtcaggccattatcatttcttggcggccgatctccgcggatattatttggaggccagcttgtccacttcagtcagcagacactgacattcttgattcttctattcttttctaatattattgagattcttttttctcttttcaagctatcactgcgtagacttcacggcttacctccaacgacagaccctcgcgttgattctctggcctttgcgccaccttgcatatacaacaaccggacgactacgtgcttgatcatacaccacagtcggagaccaagatgcggtctgcagcgaggctgctctatgcagcagtgtttgcgcttgctagcttgagccatgccgccgttcataatcctgcattggacccaactaagtgtgctgtaagtcttatcaggaccgaggataccaacacagatgactgacagtacctagatcgaaccttcggccatggtatccgatgcgtgtgtcacatacggcgagatcaacggcatgaatgacctgattttcacgacgctcaactccctcacacaagaaacggactttttctcctactatcgcctcaacctgttcaatagacaatgtcccttctggaacgacgccaatagcatgtgtggcaacattgcctgtgccgtgaacactatcgactcagaggaggatattccgctgacgtggcgcgcggaagaactcagcaaactagagggcccgaaggcgaaccacccacctcgcaatattcaagccgagcggccgaaagaacgcccgctacagggagagctgggtgaagatgtcggcgagagctgtgtggtggaatacgatgacgaatgtgaggaacgagactactgtgtccccgaggacgagggttccgccgggaaaggagactatgtgagcttggtggataatccggagcggttcacgggatactctggagaaggtgcaaaccaagtgtgggatgccatctaccgcgaaaactgcttcttgaagcccgtggctgaggagctggaggagcagtcggtcaacgttccaataggcggcctccaggcagcctctgacttccgcgacgttctccaaaaggaatcgcagcgggtagaaagcctgtcgcttgataacgagtgcttggagaagcgagtcttccaccggctgctgagcggcatgcacgcttctatctcgacccatctgtgctgggactacctcaaccaaaccaccggcctgtggcaccccaacgtgcaatgcttcaaggatcgactccttgaccacccggagcgcatctcaaacatgtacttcaactacgcactagtctcgcgcgccgtggccaaactccgtaagcacctggacgggtacacatactgcgccagcgacccagtgcaagaccgtgagaccaaaaagcgcgtcaacaagctaacagcgaccttgacggagcttcctcaaatcttcgacgagaagatcatgttccaggacgccaacgccatcggcctgaaagaagacttccgcaaccgcttccgcaacgtcagtcgccttatggactgcgtcggctgcgacaagtgccgcctctggggcaagctccaggtaaacgggtacggaaccgcgctcaaggtgttgttcgagtacgacgaaaccaagaacggcgagaacccgcccctgcgccgcaccgagctggtcgctctcatcaacacactcggccgcatctcgcacagtatcgctgcttcgcgcagtatgcagcgcgctctgctgaccggcaccacccacatgttccccgtccacggcgccgtaccctcctctcaccacgccaacgccctcggcgacaacagacgcgtgttcagcgacggcaataacaacttctatttcgaaggtgaagataacgaagatgattatgtctacggccgaggcgccgcgccagagcggtacccctgggagcgcaaaccgcctggcccagacgatggctgggtcgaggatttcatgtccgagtggaatatgatctggggtacggttgggtatatctggcagtcttggttggacatcccatttacaatgtaagttgctcttgatctggttattggatagactgactgactcttgcagttaccaaatcggcacgtcggagttcatccgactgtacaattactggctcggattgccggtgcctcctcgcatgtggaagctgaagacgccgcagccgcgtgcacatactcaacctgctgcctatgctaatcgtgacgagttatgagttctgtatttcatctttgcattggcatttgtacatatggctctgtgctatggcgttgatagactttgtctgaatggttttgtttcagtacttgaatatatactccttaatgttcaggttattttgcctcgcttcgctcaacaaactattggagttatatgttcagtgtagttttgggtgttacaaagtacatattgaagctaaaatatagagacggatgtgaataagtctgctagtgtctagatatgtataagtatgactagacgacttatatctacttcaatccttcgctcatctccatctcaaacttcggtcgcccccaggtacatgcatttgccaccgaaaagatttcttccgtacaggcggaagagcgaaccgggcaggggacaggctgagcaaacaggatggacaagagaagtctgctagttaattagacatcgctgcttattacagagccaggcattagaggatcgtccttgtgaaaattatgaagaagatctacctaggcgttgtctagttgtaggtaataccccgtgttctcggcaaaccccgacctcggcatctccaccacatgcgtcttttcttccatcttctctcatcgctcaccccccagcctcgcggcgaatccatctgaacagacgtatatcgtatctcgatgctattccgctaatatccaactccatggcgacgccttcgccaccaaaaccgtgggagcgagccggtgcagctggtaagtgtcttctcgattgccgatatcctagcgccacagagtcagcgcaatccacagtgtccacaactaacttccttcctcaggaaacgcactatcaacagcacctatcgccggtagccctgctgcctcgaccgcgatgacttctacagccaaccccgcatcgtccaccgcccccgaacttccctcccgtccgagcgctctcaactccgtagttaacaactcgccatatggagcctcacgccttggaacaggcgcgtacggatccagctacggaggcatgggcgggatgggtggcatggcttcaccttactcccgcttcggctccatgggcactatgggctccatgtacggcggcggcggctacggaggctacggaggtggcatgtacgggggcatgggcggtatggggggaatgggagggatgggagggatgtacggtggcatgccaggacaagatcctaatgatccgaacagcctgacgaactcgttcgggcagagcacacaggccactttcgtcatgattgagagtattgttggtgcgtttggtggctttgcccagatgctcgagagcacgtacatggctacgcacagttcattctttggttagttccctggaagaaatacatgatacatggacactgctgacttttttagcaatggtctcggtcgcggaacaatttggaaacctgcgaaacacactcggctcggccctgggtattttcaccctcattcggtggttccgcacattgatcgctaagctcaccggacgtcctccgccagctgatgcgacttccttgaccccggctgcttttgcggctttcctcggcggtcacgccgctgctacactcccccgcggcnnnnnnnnnnnnnnnnnnnnnnnnnnnnnnnnnnnnnnnnnnnnnnnnnnnnnnnnnnnnnnnnnnnnnnnnnnnnnnnnnnnnnnnnnnnnnnnnnnnnnnnnnnnnnnnnnnnnnnnnnnnnnnnnnnnnnnnnnnnnnnnnnnnnnnnnnnnnnnnnnnnnnnnnnnnnnnnnnnnnnnnnnnnnnnnnnnnnggcgggcacgccgctgctacactcccggatggctcaccggttcccgccaagccatccaagaagccattcttcatgtttttgattgccctctttggcctcccttacctcatgggcaagctcatcaagaccatggcccgatcccaggaggaagaagcgaagcgccgccagctcgtgggtgttggggccgagggcccagcatcgctcgacccggccaagctggacttctgccgtctcctctacgactacacccccgagacccaggagagcaacggcattgacctggccgtgaagaagggtgacattgttgctgttctcagcaagtcggatcctatgggcaatgcctccgagtggtggcgctgccgtgctcgcgacggccgcgttggatatctccccggcccgtacctggagactatccagcgccggcctactcagcaggctatcacgacaggcagcgagcctgctactcccactactacgatgaagggcgaccccgcaggccgcacacagagcctgtcgtcactgagcaagcccgagctcaacaccaagatgggcgatatcacgcctgagagcttccagaagagcacgttctactcatgagctatgctagacttgcttggctttctccttggtccttgtctttgaaatagacaagttggaacagtatatgattttttatagtgacgtgaaccggccaaaaactcccctttgagctttgctcatctttatatatcccctcgcgtgccttgatcttctcgatctcttatgaccagctgtgcaggtagcaccttgctctgcctggctcagtattctccccagcgcttcccctctttgtccatttgcttcctctccttctgtcggcttgaattcgtttagcgatctctcattggctttgtatttagtacttattagtgcatgcacacacatccacgcaacctctcccactagttctagttcgaaacaaaagcccctcttcctaacaaaagtacctatcctttcccatccaacatcccataatcctcctcgtggactatcgtctggcccacagtgggccatgccattcccgtcccgtcccggcacatatccgtatccgtccccaccgacatttgacatttgacattgacatttgacagtcgatacatcgaatatcattcttgactactcaatatgtatactgccgttgcaatagatacatcgtatatcattgtcgactacccaatatatacatatgtccaaggtacaacgtacaatgtatgtagtatgtacttctggagtaaggaaggtaaggggctgaaagtcgtgtccctttaccctgcgctgattgtgggacatttgtacggagtactttgtctaaatagtgggttttaccacccacatacctgccttggagaaatattgatgtgccgtgtcgtcattatggtactttctttcgtagttgatctacggagtaaaacgaggttaaacgcttagatgggtctcgttcatcaggtttcgtttcattgcgctatactttctacgattccttctgtccggttgtgtcacgtcgcgaagtatgtacgtttacgtggatgtgtatatgatcgccggtgatctgcgtgtcagggctatgtacttagccactatgtataatcgaatagaagtgtaggatgagtcaaacgtagtgtagtgtcgatcgatatgttatgcatgggaatcccagaaaatatatgaggcgtggagtacggagtacacagatgacagtgtccggatggagcgagtatgatggagcgaatgtgccggggttggtcggggtaataggcacagggcggggttgagtcgtaaaatgaaaatgaaaatgaaatgccgagcagattcagattcgggttgcagtatcttccagggttgtgtctgagaaaagaaatatcatgtcgggtgagacatgacgagactgactgggacagggacagggactgagccggggtgttcagtgtcagttgataagaacagggacaatatcggtcgagcggatggagtatcgttgtggagctgatgcccctttcgtgctacccatacttgagaagcaggacagatatgcgagatatgttggatacagaaaatcagatgccatgcatagaatagatcatcaatctagaacgcgaatacccatatccatatccatatccataataagaacgcccgtgctatgagtcttcctccgttggctaagtttggaagggagatgggggtcgggacggagcatgggaaccatatacatcgacaaaggccaaagagacaagaaaacgggctcacacgctgatgggaatggggaaatcaagaaaaaagaaaacaagatggagataatgaggcaaagagaaatgaaaagaaatgaaaagatctcaatcaaccaaaaccgaaccacaacaaaattaactaatcacatccccaatccctcatggtgaggaggctcgtggttagggtcatgatccctagcccacttcgacatcgactgcgtaagcgtaaagtccaaatcctgcaaccgcgtctggaacgactcgaccgtattccagtcaggcggatgggtatcagcttcaccaggcgcatcctcgagatcccgaggcgcaggaccaggacgagcatgcgggtgcgaggtgtgcgtgtgcgcattgtgcacgctgtgggatctgtgtccgctgtgcgcgctctgcccatgcgagctgtgtacagcatgagcggggagcgggctgtgcccatgggggctatgcacatggaccggatgcgggctgtgagcgccgtgcgagtgagaccctgccccgtgcgcgagatggttgcctattgactggtggtaggactggatctggcggggctggtttgggtgcatggacagcggcatggtcgggctttcttccagttccagatcggggaggctttcaaggtggtttgggtctagagcgagatatctgccatcaatatcatgcggtacactcacactcaccggaacggctgtggatttaccgtatgagccgagtgggtaggagggcatttctcgggttggggattgcatgtcggggggtgagatgggggttgtggcgctgtgttcgtctgttggctctggggtgtagcaggtcatgtcggagggggtttctatgggattattagtatgtatgtttggtttgataccgtctagttcatatccatgatgattcactcacgaggctcggggcttgactcggccttttggtccttgccgcggttggtatcccacgttgttccatagcgacgcacgaagcgggcgatgcgcttgggatcgacgttctggccgtttacgcggaaggccgtctgtttgccttgggcggcgcgcttctgttgcttgcgaagcatcagatggacttctttggctttgatgttctttcgaacgtgccatgcggccagacgatctttgtattgtttttctctagagcgagttagatctattcagacgaaggtagaagagaagggtgtattacgatgcaaagaacttataatctctctccataatccgtttcacatcgcgcagtttcaactggtcgttgcggtagagttgctcgatgatttcacgatattcatgccagtcatcggaccggcggggccgaaagacgtttggcgactgaggggagatgggggttgcgtaattattttccatggtgagggtgaggtataggtataggtaggtctagatgaagatgcgaggtcgggttataatataactggaatgcaaatcatgtaataaatgcaaaacaaaatagcccccgtccccctagaaatccgtaaaatccgtaaaatcccaatccgcaaatcgccaaacccccaaatggcccgaaagagcaaagaggaaagagatcaaagccaacgagttctctttggggcgacgtgcacgcggacgcacgatcccctggttccccgggccaatcacatcccagcacttcagacccacacccagctatgacccagctatgaccagccatgtccgcggccgcaacttgggggagaatatctccgggttttggtcttgatgaggtaggagtcttctttgttttgttgattgaattaatggatttgagaggtatttcaatttatttattccatgtatcgcgaattaatatcaaaccaggatgactcgatcacaccgttagctggagacctcgagtggagctgtactttggcctttacgcctaagcgaactattacatgcagtgcactggccgcaaatggatgcattttccgttgcctttttcgttttttcatttcttttacggagccctcggtatggagtacgcagataatacgccgccgagagtccccatctacccctattactgcggtataatacccaatacaaagattacctgcagatccaaaacaccgccgggagcgggccgaatcttccctgacaggtctttgtcttccccgagtctaaaatcctaaaatcccaggggcgtggatcaatcagccacagaatgggagtaatatcgtgtatagtatagtatactatactatagtaaaatacaataataatatatctcaatatgactataactacggagtataaggtgccaatctcaacggaggaaaccgttaaacccgttgacatccaccgcaagaggggaactcactgcgctttgggctctggacaaggttaccctgtccgaccaatctcccaacggtgctgtatatgtatgtatttataggctaaactgttaattataaaccttcgcggccgagactgttatgaaaaacgtacgatgcaaggtccgtgctactgccctttttatttatttattatgatatagtaaaatatgataatatattatttacggaatactccgtactccgtacttcctcccgacagaagtacagaactctgatctatagaatatagtttagatgctggatccctccgttgaacacgtagtacgagcttagcaggggtcactggtaattcaatcctacgctcatctacaacggtgcactgcacttgccccgctatcacctgcacgcgtggcccatatcccaagggctagaatcagcatctcccagggactagtgtcagctgggatcattctgggcgatgggtgctgcactgatctacagggtttcgtttctgggctttcggggagctggaatactagtccccgagagggatagggatgaaagggatctttgctttgagcttggattcttgaatacaacgtggctagttgggtacctcctgacaatccgattccataggggataggggagaacaatgaattgacgatacgccgcgaagcaaaaagaaaagaaaagaaatggaactcctcccgcattgggcctccaagctattcgctagcccccaaatggacatgatcgttcttaaagtgcggggtgtactttggtctctcctataaacaagataaacaatataaaggcatacaagatacatacaacatactaaactcagcacagattaaaaacaaccgcgctttcctgaggggaacacaacggccatcccgcgtggagcccctccactccgagccgcctgtatccggagatatctgccgcggccacgctcataggtccacggaccaccgttcaccggctcggatcgcatgcaggtactaggatgtacggcgcagactggaagggcactgcatgccggacgcagctcgctcatccgcagacgagacggggaagggattgagaggagtgggggttcttttggcccacgcgctggtaacatcggtcagggggggattggttgggccgagtccagtagtttgtgacaggccaatgaaacggtggggacaggcgttggttgaaacacccagtggcacgtcatggccatcccctataatgtacatgcatagacaaagtacgagagtgatgcgctgggcagtctttaatttcatcctctgcgcgatttttgatttgatttcgatttcgatttcgatttcgatttgattttcgattttcgattttcggtttcccgcattgacatctgatccttgcttttggaaagtttcatgtgttcatggtttattcttggtctgtcgggcttgatccgcggctgcaacggctgcagccgcgacggctgctgagttggaccccgtgctagccagattgctggcatgcgcaaggaggaacttgcagcaagtcagcgtgtacttgcaggctcgagtccacgtctcgtcattctggttgaagcccaacttgatgctggcatctccaatccgatcccgcttgatctcatagggcagctttaatcccggtgcggtggcgccggtctggccgcgccggggagatacaaccggtgcaggggtcttttccacaaacttccccagctgccgcagacactcaaggaacgccaccatgcccgagtcaaagcgacggtgaagccaaggaaggttgagcgggagatcgcccgacgagaacaggtctaattgggtcaccttgggtgcagcgccctcgaccggctggccggctggctgcgtgggatattcaatcttgtcaatccgcgagttggaccccagcggcttgagccgatacccctgaaattggaaccccagcttctcggccatcgtggccagaaggagggcggtttgtccccatgcagcgttgatttcaggccagtcaaccgaaggattggccagccggcccagccgtagtccattgatagtaccgaaatatccatcatgaccaatgcagaacgcgtcattgtagacattcgtccgttgcagtcgctccagctgctgggagtcatgatcataccgcatattgagcgcatcccgttcgttttgaaactcggttagcgtcaacgcaaacgcattgcgcgaccgccagaagctctcctcgtccgcatccaggcggcgcgattcgatttccaagctggcaatctcggcatctagagcagccttttctttctcaaaggcctgcagctcagcgaaggcggctcgttccgcgtcgaggctttcattcaatgatttctgtgccgcctgcacctcctcctcggtcgggatcgacgcgttcaggttcctgagaaaggagatgtaggcgtctcgctccttcgtagaccccgccaagcgtttttgtaatccttccacaagcagctcggtgcattccacgcaaataggatggtcgatatcggagcgcgccgagacgatctcaaacagccgtgtcgttttctccacctgatcaacgagcggcccatcctggtcatgcagctgggcctgtgtatttcgcttgcttccactctcactgaccggtggtggcgcaacttgggactccgtgagcatcacgaatgacatattgccgctatccgcccggggtactgggttgggctggcctgcccgcggcgcagggatagaccgtctgtaaaccggcgacgtagcatgtttagaggactgatcgtacttatcgcggcgttcgtgcggatatgacgatcgcgctgacgaggagacagctccggtatccgacaacgtcttgcctgtagagtctagaccgattagcgggatcaacgatcgcctgtgggatgaacttactagatagcaagtcaaaggcagctgggttgagtgactctaccgagccatccagcttcaacggcgtgcgacacttctggcaatacatggtggttgttgttcatttcggtgtggggagtgaagtcgggggagctcaaggagcttcggcgaacgtcatttgttcctttgcatatttgctcgcgcttgcgcctgcacaccacattctactctactatcaacagatgccaatttgattatgtgttattttactacgcgttcaatgttcgatcacttctaatgcatctatcgatccttctccgaccatgaacccggacagcatggaccactccatgcaggacgatatggaacgaccagcgaagagaccatgtttatcatataccccaaccgaggacgacgaggttcccgcggaattcgatctcccagctgcacgcgcacagaatgactcgcgactgaagtctctcttcgaacacattttcgcgaaatatagcaaagacttcacggacgtcggtgatgagattgacctgcagaccggggatatagtggtagacaatggacatctcctgggtatgcggagcgagcacgacgccggccagccgcgatcatggctctcccagggtgatctagaggacccagatgcagacgacgacaccgcgaagggagaggaggatgaattcttctctatggcatcttctcctggtcgttcctcggctccacgcgaagaatcgccatcgaaacagctacagacagacatggacacctctttagacttcgtgtttacatttaaatcatctgggactgcagggcacagtcctacgaccaaggaagaacaagcctcccatccgaccaaccctagcctaccttccaaaccacaagattcaatctgggcagtcccagatctacctgcatccttttcaacccccaccaccgaaacccgcaaaacaaacgcgggcttctcttcacctgccactgccacagccagatccccgtccccgccagggagcggctcaatctgggctgtgcgtagaccccgcaagccacgcacagaaacgaaacccaaggccacgcccagcaagcgtcagccagccgcgaagcgcaagtatcattccagccctgtcacgcgcgactggtcttttgcggaagtgccagatgggaatgagtccgatgacccgttgcaggactatgagccgtcgccgacgccatcgagggttaaaatcattcgtggaaagcgtcgcgttccgactaaggttaatgatggtccttctactccttccaagcggccgactgttgttattgaagttgagcggggtgatcgccaagagggggggtgtggattaagtggccatgcggctgaggtggctgacgcacatcttgaagaacggggctacgaactaagtggtggcgatgaagttcctgatacacatcttgaagaagggggctgtgaatcgagcaatcaggtagatgaagtacggcaatcgatcaatgtatcggaagcacgaaaaagcccgcgaaggtccgatcacatgtccgaccatcaagagagatcggtggctgctacgtggatgaaagctcatttacacgaacaatggaaccaatcgagattcgtcagagaatatcgcgctacttttggtcgaagccgaacttatataaccctgaagagatggatggacgagaaagagaactctcaagcgaagagatgtattgtcataccgaaagttccggttacatgtctgcatgagacgttatcgaatgatagttcttcgtcgccaaccctgggtctttcgaatggtaagctctgtgtgccatcaacctttcggaatgggccccccgaggagtccaaacgtcgctgggacgtagcccctattaagatagaaagtggtctttctagcttgcctgaagcatgccctgaagaagaggaaccgagcattcaggtagacgaggtgcctgaagtacgccccgaagaagagtgctgcgaaccgagccaccaagaagacgaagtgcctgaagaacaactacgagactacgaaccaaatgatgaagaaaacgaagtcaccgaagaacagctgcaaggaggctgtgaacaaaatgaccaaaacgaaacatctggatcagaatataaaaacgaactgccatgtaatcctatggtacacgattccacccccaagacgacagccagcatggcttcatccccgcagcccgaaaacaccccaagcaaaaggcagcccatcacacccgacgaagcaaagttgatcgtgtgcatgatgcacaaacaagaaaagaaagccagcgacgtaatgcatatgttgccaggtcgcgaatacccgacagtctggcactggttctacaatcactggacccggcgtcttgccaatccgcctcccctttccgctgcctggtcgcagcctgagctggtatccctgtcccgactcagcacccaatcgggtcttacctggggtcagatacaaagtcgcttcaaggggcgatcccgacacgaggttgagtttgagctgctacgtgcttttgtgggtgagggatttccctctgccatggtatggaacatggaggaacaggtggagccggaagagctgccggcagagctgcagccggaagaaatgcaagacgagataaataatgagccgggatctgaagcggccatgcagcaagccccagatgaggtaggaggtagtaatgctgcatgcgaagacattgcccaggaagagcttaagcagcttggcatccaagaagtgaccaacgccaccgacagtaagacgccacacaacttcttgggtattgttatagatttctgactatagcgatagtgcaaccggattataccaatacggccagtgattgacaatcgacaatctatccacacgtattcataacatgactaccataccattcaatctatatctaatgaaagtcttcgtcctgtgcattcataacatcctcaagcttcgtatcaaccgccccaccaacatcaccagccttggcccagaatttagacagatgccgtgaaccagagtccgaaaggaccgtgacaatccgatgacctgggccaagcctcctcgctgtcttgacagcggcaacacctataaagcaccataagtaaaacacatgtgcgctaggcaaagagggattcaacccacaattcactgcactgctgctcccaataaagatcccatccttctccacaagccaccgcgccatagccaaagcctgtgcatcagtaacccgcaccgcatcatcaatcatctccttccccgcctcgaagttcgccgtgacccggttaatgccaataccttcaacgatagtatcaacctgcggacgccgccgcgtcccctcccgctccttaacatcaaacataacaccgtagaccactcggttgaaaagcccacttccctgcgggtcagccagcacaacattaaggctaggcagcaagggctttaaaaacctggccacgccagaaatagtgccgcctgttccggcgcccgctacaaacgcatcgagccggccaccgcactgagcgtacagctctgggccggtcccttcgtagtgggcgcgccagttagcctcgttctcgaattgatcggcgaaaaagccacggccacgggtcatgggctcgtgtcccgcggggggatcggattgcccttccgctgatgcagatgatgcagagggggttcccgatgaggccgtgtgcgtctttgctagtgctcgtgcgcgattgacaaagttgtctttctccactattggcgctggcggaacccgatccacgattgccccgagtttcagcagcaggtcggatttttcaattgcctggtcggacggcaggcagctgggttgcattggcgttagtgttttttgctattggtgtgatgccagggtggcgcatacgtacatgtgtgctaggtagccttttgcccgggctagtgttgctagggaaatgccggtcgatcccgatgtgccttcgtagattgtgtcgcctgaatggggtgtcagaagaccttgttcttcggcctggttgaggtcagcgatgctggtctagtgcaggaaactttttggtttttgcgtattttagcatacaatctcgatcatgcttagtgccactcggtcttttgagctctggccagcgccattcaggaactgcggcactgttagcgcattcttagctcttttttggggtggttggtatactaagtactagtcacatacctctgccttgcccagaatctcacatcccgtctcatctgatagggacttgatccggaataggggggtgtttccgatacaaccttcaatgccttccacaatagagggcgggccagctcgggtgccatttttgggggaggttagttctggctcattatcctcatgtctgggacgtgacagttcttgatatgcgagtgccaagcagacaccggtcacgaaggccgtgcctatatacgccgttgaatgatctggcatcttcccatgccgttatgtcttgatagaggttatgtgcataggatatgaagctcggaccgtcaggctttttggtggacgacaggagtcagcttatattccgtacttcgatgaaagaaatattgaaagctaattcaaagagttctttgtattcaaattgcattcagttcgaatattgtaatgtccaaagtctcgaaaattgaaggtgatgggtttcgcctgaggcacgtggctccggtcatccagaagccgttctttccgttccccggaacaaccgtgagcttagctctacagtcacaatggactcgccagtccttacccagctgttccgacagctcttccgtcatccagcatgtcgatctataaggcggtcaccttctgtacttgctcgaccacagtctcgatcatttcttacgcgacgcacccctgtcaacgtgaagcgcaaaccgcacgaagaaatccagctatggacaaagcggggagactaccccaagaacatcgatgaggagtacaggaagtacccgacagttacagcgaaggagctacgcaaccgccgcgaacggccgcggcaggtcaaaatgctgacacgcgagttcatcgacggtgagttcgacagctcggtgaagcgtgactagttctgatatagccgtagacagcctctacaacccacattatggatacttttccaaacacgccaccattttcagccccggagagccattcgacttcaacaacatcgaagacgggcccgcgttccacaaactcctcggccaacggtacaccgagttcgaagacaagcttgatgcaacgaaaccagatatcgcgcggcagctgtggcacacaccgaccgagctcttccgaccatactatggcgagacgattgcgcggtatttggtgtcgaactacaagctgaccctatacccgtaccacgacctgatcatctacgaaatgggcgcgggaaacggcacaatgatgttgaacattttggatttcatccgcgacaccgattacgaggtgtatcagcgcaccaagttcaagatcattgagatctcgcccgcgctggcagatctgcagtacaagaatttgaccgacaagctcactgccaaaggacaccgggacaaggtccagattataaaccggtcaatcttcgactgggacacatacgtccattccccgtgtttcttcctcgccctggaggtgttcgataatttcgcccacgacaccatccgctacaagctcggcacggaaatgccacagcagggtggtgtgctgatcgatgccgacggcgagttccatgaatattacaacaaccagctcgacccagtcgcagctcgtttcctgcgcgtgcgccaagccgccgcccgtcgtcctttcccgagtcccttgggcccaccacttctccgcggactccgctccgccgcgcccttccacaaggaatactccctgccggagtacattcccacccgactgatgcagttcttcgatgtcctgaaccagtacttcccagcccaccgtctcgtctctagtgacttcaattccttgccagatgccgtgcccggggtcaacgcgccggtcgtgcagactcgatatcagcggcagacagtgccggtgtcgactccttttgtatgtggatgtttctaatgtgactttgaatttggctgactttttgcaggtccatcaaggctactttgatatcttcttcccgacggactttaatgtcgtcgaggatatgtaccgtgctattacgggaaagctgacgcaggtcacgagccatgaggagttcgtgcaccgctgggcttacattgaggatacggagacgcggaatggggagaatccgctgctgagctggtataagaatgctagcatgttgatgactgtgtagatatggacgatgtcaatatcattcaaccatgccttgggcttcgattatagcagctccttctctgcgggagtgtaatttgcctcaacagcggtttaaccctcaactcaatgcctcggtggaagtcattgcacatcctcaccataaaggataatcccgatgacgctcggggccatcacacacccagattgtgatatatgggagtctccgttaggctctagatgtcgtggcaaaggccgcccactggagttgtcaccatcaaatgtttctctgccaggtaatcgagagagattttgagacgcttcagaatcgaggcgacaatgaaaatgaatccaggctcaagagacaccaatttccagtttgacaatcccaacccaaaattagaaatatccagctctccgaagtgatagcgctgtacttcccaacaaaccccaaaaacacaagagcaaacaccagcctacctcctaattctgcggaatccgaaagacaccattagcaaggtccgtaagaaccccaaccccaaactccttaagcgcatcaagtatctgctcaacagtagtctgcgccagcccccccttatccctcgagtaaatatcaacgcccgcaggcgtgaagagcgtcttagcaaaatacgtaacaacccactcgttcccatcatcgccatgcccgaagccgagaacctcccagtgcgagctcgcgatcaccagccagcctttgccgcgccagtcccaggcgccgggaacacctggcgtcggggtgtcgatgccatggacggattttattttctcggagtcgatggattggtattggactaggtcgtcgatcttttggactccggttgaggagggggggaggagtgtgtaggttatgttgacgttgcgcttgtttttccatagcgggaggctggagtgggttacgtgccatgttccgattatgaagtcggttggtggggggttcttggttcctgagctggaatatattgatgggaggctgagggagattggagacatgtttttttgggcgcgtgttgagtctatggaggtgtctggggtgagagctctggtggcgtatattggacgatccctacctgaaggggtgttatcgtcgatctatgcaaccctaactcgcgatgaaagagatattgtcgaagtagctgggatcactgagcaagaaaatagcgcaagttaccaagttgaggggcactaaatcagtatttgaactgatgatactgatagatgctacgaaagtatactttcgtttgcttcaaacaaataaatctttacataactcaagagaggatagtaatcaaacattaattcattcaagccggctcagagcaggagagtggcgatacaaaaggatacacatacatatcatttctccctgacacaagcagcatttcacctaaggccaggtaatctcctaagttattctacatgaaggtctgagcaaatgcggtctgaccaaagacaggctgagaaaaagccaaaccaccgaaaagtggctgggcaaaggagggcttctcagtaggacgaaaatggggaatattcggttttggtcctttcggaattcgttgaaccctctccatcaatgaggtatctggaggaagaggaggatcctttggttccggtgcgagaatattcgttgtgatgttcacgttgttgattgaaattcgcgagtgcgtagaaatgcctgccttgcgattgagcccactgagggctttatctagctcgtagagaatagcagcgttcagggaggctggtgtgcaacctggtgcagggtttaccacaggcacggtgatgttgaagttctcgagtgttgtgcgtgagccacgataccgtcttcgccagatgtgctcagggacgaatagtcggcagtggcgccaggagtggccgatctctgcacacttcctgcagaacgcggtgcatgccccaatatgatttctatcgcaacggtcgcagcgagagcgataggtctcctggtaggatctctctctgtcgtcttgacagaagtgtgggcgcttgtaccgtgggtagtcgtattggtcctcagcttcatcaactctggcacgcttattcgtagtcctgaatatttccttattagcggagaccttggatgagactctagatgcactctacacacgtatattccattttgacgcgcgtggagagagaaacagaaaaacaaaacaaaagaggagaaggtcgggggttttgtttacttgaacgaacgaggaaggaacgactctgtcacatgctgaaggcaaggcaggctctgattcttcgtgggaaagagcgagtgacgagactgatatgaaagaactcatcgggcaactgcggtcccagtctataatgtctgcaatataatgagcaaactcttctataagtgatactctcagcttatttatctgactatcaagaatcaagaaacttctatgtctaaagttgaattgcaagtgtgagaggcttaattcatttaactatggcatgtttggatcattggatttttcatagaggaacaaaccccccggcatcaattgcgctgcgctataatctccgattgtcctgacacacaagcatcaatgaacttttgtggaagcaacccgagtcgtggatccttccctgcaactgacagtagccttgctgctacatctaggtatgaagagctgaacgtaatccagagagacatttcgggctcagaatcttccgatgggcgggggtaatatggatcgttctcgaaaaacgcatccacgagatgagctatcaagtcatccggcctttccagtccctttcgttcctcccatatattgcacaaattgaagtcgagaacccatacacaagtggctcggcgttgaagcttgtcacgtctcatgctttctaggtctgagtgaggggccatctccatgatattttctgcgctgagtcccaacgaacgagagacatcctgggtgtatgtctctccttcgctccccagcacaaattcaacatcgtagcaatccacgtttgctgaccagtgcatgatcgctaaagcttggccaatagctctagcataatgctggatgggtagatccagctcgatcatctgatcgaggcacaagttgaagtttctcaatgtgaaattacgtgatggcgggtcattcgtaccacgccgacgaccaagatagatacgaacgagacaatcacggttagtgtcttgagatgccacggccagcttcgaggaagctgggcaataggcatcgatgagagcttgtcgagcaagcttgggcagtggaagtattcgttctgtgatcaatgccattgccggtagagggaaagagaggtgtgatccaaacaggttgatatgggagtcccaccacttatcgtttgtctttgggacgtatgaaaaaatgctgggaacccgtacttcgacggactggtttgtgaacgcctggtataccgcgagatgggcttggaaatctgtccaaagggcattttcgaatgatggacgggcgatttttatcgcataggcatgcccaggccgctcgaagataattccacattggccaaagccgatgctgcgataaccaatagaggctgtgtgctgttcggtgttgggtaatgcggatggggacgtagaaatgacggaactcgataaaacccggcttaagacttcacgcggctcggtggaaagaagatgcaacgctgaagcaagctcttcatttcgcgcagcatcaagtaaggcggataagctgttggtaagctcgatgctcacttgattgtgtcgatccatgtcagagagaagtgaagttgaatgctgaaatgacgggaccggtagattatctttgaggtctttttgatggtctttttaagagtcctttaggagtcctttaggagtccttttagataggtcgagtctgaatatgatcaacttcaagcacagggtgtggtgagaaggagacaatgtgtaaaacggggtgagctaggcagccagctaaactacggcttatgtacaaaagatatagttcaagtcaggtcaatagaaactatttactttgatctgttcgggatatccaatatctatttagtgaaatggcaagggtgaccaagctgagtatggccgtgtatatgtagaagccagactgttttcgtgtattttctacaaacaaacagagacttatatagatgaagcctatcaaacaggacaaatatggcaggccattcacctactcattctctcttcctctccctcttcctcttcctcctcaccttgtctttctgtgcctagctctaaagaaacgagatctttcttccttctggttgcaaaatagctgtatattgccctacgaatgagtgcaacttcaaataacccatacgtgggctgataacccaaaggagttgcataatcaactcaaaagaccgttattatatgattagcattggaaataacaacgactacagtattggaaattctattaaactccaagaaactgtggctagatgttcaaattgacaaggcgcacttgtccccgccacacgggcagacaaactatagggcattttcaaaggaagcaatgcgttcatgaaacatatatatgaggaaatgctttttcctccatggcttggagatcccatcccagcagccatcaatgataaaaagtagatacaatgcagccaggccttgtcagccagaataaaaacatatcccataccttcatatacgcaacgaccatatcacaatcaacaatagcctagaattcaaactccttgcggaagatgttaacgtccatgccggcgacaacctggtcagccaagtcacggcggcccatctgactgaacacacgacgcagagtgtcgtatagattcgtgctctgattctggctgatgtgcaacatgcgctcgaggcgctcgtcgtccaggccatctggatgcacaccgtcgctgatgatctcacgtgctcgctcgcggccctcctgctctacaacgcggtgcatggatagtgcgcctagcaggtgctgtgcggcttctgggtagcagccgatgttgatgcaggatacgcctaggttgtagcgggcgcgcacaaaattgggattaatgttgagggcttgctcgtaggcttcgatggcttcttccgagcgcccggagttggcgagggtcgcgccgagtcggttccagaggaggtggagctgctcttgttggttggtgctgccggactcggtggaggctagggcggcggagaaacagtcgacggccttctcgtattcctcggcgcagtagaacagaacgcccagtccgacttgtacgtcggggtccatctgggctcctgagggggagagctgggccgcttggatgaatagttctgttacgcggtcgtggaggagttgacggtctgtgaagccgaggtctgaatcgccggatacttccttcgggtcgatgatagtggggtacttgtgggacagccaacgctcgagtgtgcggtaggcggttgagtcgtagccctcatttgtatacgagacagccaagcccatcaaggcatctaaattcccggggtcgacctttagcgcttgttccaatgcacgaatagcgggcaactccttttcgttctgcgcctgcgcagagcccagcatcgtccacgcttgcacgtgctgtggatccttctgaaccgctgcctcaaaagccagcgctgccagcgacagattaccgccgtcacgcataattttcattccctcctcgaacggattgccgacagcctggtagacattatcctcctcgaacatatagtcgccgagctggggatctcggaaacgagagttgagactatcaaagccatcccagtcaccgaggtcaccaacatgcacgttatcggtgacttcaaagttatcttcctcggcaagttttctgctcgtggtctcagcctggacccgttgccatacagactcaaaaacgtcattgaagggcactgacctgtccaaatcattcagttccgcctccatcgccgcattagcctcttcgtccgtccgggtctcatttccaaccgtcgcagtctccatttcagcaaactgtgcctcccagttttcatcgtcgagctccaccatccgccccttccccttatcctgtgtctgcccctccataggcccctgttgcatgcccatctgcccacccatcataggctgcatcatccccataccgcccatacccataccacccatataaccaccgcccatcgccatcggccgctgataccccgccatcataggcgatgcgttcgcggcagcaggactggaggtctgcggcatgcccatacggctctgctgttggaatcgtgcaaactcggcaggactaaaccccgatccgttcttcatctggcccgggaacgcggcttccatgcgcgcttgctcgcccgagtcaaactcccctgcccatcctggcgaccctgtgcgggccgggcctgtttggaacttatccagctcgcggcgcatgtgctccattgcgaacggctgcggtgagggtccgtttagttgttgtcctggttgttgcatgaaatcgtccatcatctgataaggaggttcccaactccgagattaattttccgttgctgattcctttgcgaggggctgtgtggctcacctgatcctgtccgcccatcatactatgtgagcgcatgccttcttgcatgcctggtccccggcctaccagtcggtcgcgctgtagtgatttatcatcctggacgtgcttcgtgaattgtgagagcgggttccccgcagtagagcactctgggccaccgaggaacgacatggtgggtatgtggcggtttaagacgaggtagtattaatggaaattaggaagagaagcgaggacaatgtaaaggtcgaggtgcattcccccggatatcgttcgacgtggggctcaagggctttccgcctcgtcagccgaggttccccgacggcagtttgagagtcacgagatacacgaggtaccaggtacatacaacagttgcatatgaaaatttgcagaatataccaggatgcgactttgggcttattcgataccattcatcgttgtcgacagaggttaactggtgcgccaaggcgtcagatatgcaagtttgcagatacagctctcgtctccggatctttgccacctgtcacttgtcctaattattgaacatcatggtgttttcaaacgataagatctaatttgcaagttatatacacacgaatccatcacatagtaaaacccgaagaaaaggctagctagggcgtcgtaattgatgcctttggccgtaggatccaaaatacagcccttatagatccctaagcctgaacaacagtattcaaaccgaccagaatattgtacgaagtatattactataggtgatattaaggctttgcggaaagatttagtactaaaaactagatcctagatctatacattgaagagggcagcagaggcaccgacagccctgcctgcgatacaggtgagagcaaagtcgtcactgggagtagtaggacgccagagaggagaataccattggatgactactaagaagagaagaaggtggaaggtgtctgcgttgcggtctctgtctcagggacgataccatgtacccttggtatggtctacctagtaaaaggtacattttcccgaacctctgtaattctgtaagaagggtaaggatgttgaattcagtgtagattcatcccttacatagtaggcttagaagtagacagagggcatttacctagaaattatgcaaaattctaggcagcacttggaattttcacgctaagataggaaccctcagttccctgaggttcttcccgctgacatccatccttcaacactgaccatgtcgagcagcacacaatcagacaaccccggcgagaccatacgtctggccgtggagcgatttcgcatcaaaatggagtccgcggatcggcaattcattcaagaccgcgtcgatgagatcgaaactatgcatctctcgaccgatgaaaagaaactgagtcatatgcgtcgctactagtacgacttaggaacgacaagctcaagtgagagctgggatggtaacgctccccttggccctgttcagcaacatcgcgaggaggcaaaggtctcgcggctagaggacctgaagaccacatttcatcagtatatggatgggatcgttccatcaactatggcgccagatgaatggcgcgaaatgtttatgaagactttcgaaagcgtgtctaatgaggctcctcggcatgatgacaacgatgatgaggacttttatattctgagaagtgatgaactggctcacttcatcaaatatgccaatggtgtgcacgatccggactctcgtcactcgggcatctctccgtgggagcccgtgcctccaatgagaatggaaattcgcgagtatgcatatacggatcgtccggctgttcaagcactaactcctcctgacatcgcgaaagcacgagaagaattgaaggagtctcttgaagacaggctgctagacgaaaactggatttggggccattgcggctacgaattcgaggtaaaggtcggtttccatactggcctcggctcgtgtatagaacacgatgcatggtatagcatctatatgtattgtcgtcaatttgaagaagactctgatccaagtcacaagtactggacatggcgggttgtcatttttagcgctgatattatgaatccaaccgagccgatatatattctagatgtccaaaacaagatgataatctagctattgccataagctcttctaatagtttcatgtcgacaaagacataaagatcttctcctctggaaaccaggagaagcatcttctgcaagatgagcaaatagagagagtgccaaactgagcctctgcaggtcagataaagaagctgccaacacaacataaagcctacaagaggcgcaaggatactgccaaagagatttctagttcctgcccagctggcggtgatgtgttgtgccgagttcagcgaatgtctcatcagtcgaagttgatcgtcggctggagaccaggcaatcaaaagatgctctcgtgaactgcgacagcaatcgtcaagtgtattccatgggatttgatatgacacttagttacggcaatagtacgtgtagatatgatcattctacggagtacttaataaatatcgcgagttaagaatgcttccgatttccattttgggacactattgtacatttgtataattcacatataaccctctctattgcttcttctcggtctcggtctgctcagttacctgctcagttacctgctcagttacctgctcagtcacctgttcagttacctgctcggttaccggctcagtctccttgatctcagtaacttccgcaacctccttcactccgcgcactttccgatctctcatacccgagaccgactcgatattagtctgagcatccgagtgttgcttgagggagttcttcttattctgctgcctcttctcctggttacgcttgtgctcctcaggactcaagaccttgcgcttagcaaagctgacagtcagcttgcggccgtaaggcgccttgcgggagagaacctccttagcgtgagaagcgctggcctgatcggcaaagtcgatgtgtccaaatccacggggcaagccagtgcgacggtcgatggggatacggacatcagtgacaccggggatatcgtcgaacatatcctgcagatcctggtcggtcaattcgtagggaacgttgccgatgtagagggtcctagtgggcttggtttcggccatggatctgtacgtcgtgttggagaattgcaccaccacctcgcgaccttccaggatgcctccgtgctgctgcgtgattgcttgcgtggcttcctcgatggtgctgaaggtaacgtagccgaatctgtaagggagaatgggtcagtctctagtaggctttcggttgcatcggtcttgggaactcaccctttgctcagcccgcggacatcgtgcacgatcagtgcattctctacggcgccgaatttctcgaaatgcttgcgcaagtcctccgcggtcacgtcgaagaagaggttgccgacgtacacggtggtcttcggtacagggccctcgctcaaatactcacgtcggcgttcttctttgggcacacggacttggccgggcgtggatggctccggtttgacagtcgagatatacctaatcggaatccgtgaacggccttcatcggtcgagtttaaccgtgtctgtgtgagggttgggtaggcgaaccgagcggcgagaatcggagtggagcatgttgaacgcaacactgcactgctgattgatgagcgtgaagcagctggggacaattgaagccgagaaacggcccggcggaagcaatgcctagaaattagttgttttagcaattgtcctcaatgttgcatgcaccagcgagtacataatgtatacattctcggactcggactctgtactctgtatagctcacattttgaattaaaataacacaagatgcgttgatcttgtattagagataatatgatgacaagagaagaattgcgcgaagccagataactttttttcccggaagataacacccggcacgtgactgatatagccaatgataaggaggtagatcaaagcaatggaaagcagtggattggagattttatatagacaaaactcagggtttaggtgataaaacacgaagtaaacgtgagatttgataactcaagagtggaaatatggcagtagcctcatagtatgatacattgtccaaccctaacaccgacagaatccataaacgcaacatattttcttagatcggctgaatctcgccagcacgcatacatatccatgggaaagaagaagtagaaattgcttcgttacttcaagtcatccgatcaagaaacaaaacatttccaggtatcacaaatggccaacattttctggcaaaaaggggagagaaaaaatcatgtagaataccaatacaactcgttcattgggaaccttggccccgactatcgttttgttgaggcatgggcgccatgccgtaccctgttactggcacacctccactatcgggactgttggaggatactgagtataacgtaggccgaggaataccactaactgatggtacccgccctgaggctagaggactagacactgaaggctgtgacatgcctccagactgtggggttgcttggcgctgtgcatcaatcataggccagaattgatttgttgtgtcgagggttgggttttgaatgtatgtgtcccaagcatcctgatatcaacatgtcaacattgaacaccgggtcccgaaaaggaaaagacttacccaatccagattaacttgcgtgtccggcatttgcccgaacatgctactaaagggcgaaagtacacccggcatttcggccgaagcgcccacgccacctattcctgttcccattggtgtatctcccatcttgaacatagggtcagcaaagggcggagggcccgggttcatcgggctcattccgctgctcaacaggccgagggtcatggccgcgttctgcttctcgtcttgtggctcaaatgaagctccggcgctattttcaaggcctgggaccgacatgtgcagcttgctgagcatcacaccgagaaggctagacgccttccatgcttccatgctctcatcacgcgactcatcccaaatatctttcgagagttggatcgccgcggtcatttcatcccgccgctctcggccccatgtgtatgtgtctcccgatggccggccggtcacctgcaatgatacgccgtggtataggtcgagactgacaatggtggctgccagtaagaagtcggctgaactgagagaacttattcggctctgacgaccacggaggcgcccgctgtgagtttccgcgtgcaggagcgcctggacttgcaataactccattgctgagtcgatacatgtccttcgagaataggtgaaacgaggattttctcgggcgcgaaccagatatgggcgatgaagcacacactgagccttgttgtatacggccattacctgcacaaacgattagtgttgatgcgaattgtggccgctgtcagacaacttacgaaaaatcgcgacatgataacattgataggatccaactggcactcctccataggccgaatatgcaagtgctcggggatcatgtcccttgcctgtcggagttccgcgtcgacttccatcaccttttcgtatggggccgccgatacagcagagctttgttcaaccacacgtccgaatgcatatgacaggcgcgccttagcaatcatatatgagattggggttggctcattcaattgacgtggtggcgggagctccttgcagtcttcatcgaaatcatcatcgtacaaattccgtggtagctcagtatcgctatctgtactccggatcatccccggcaacccgacctggtatgaaaacagaaggtcggcttggcgcacaaaggtccagactcgccgtcgcatctcaccctggaaaggtgtgatatttgggaacattttggagtcacggtgatatcctgatcgcattgctaggcgaacaacaacgccggtcatgacccagatcgaaatatccgcctctcgggtctgggagaaatcgccatgcagatgaaacacgagcgcttcaatcaagaacgggtggggtttcgtgtagtcagccaatgtcaagcactgtgctacagaattccggaatcccccagccatgtccatggacttgccccggaattcaggtggctcatcgccttcgcggtggtaagacagcattgccagcctcatcattgcaaagagcatggcaatccagactagttcggtcgcggcaggatcatcccaatgtttattatactagcagagtcagattctggactcaatgcaattattctcgaggagcttacctgtgcttggaatgtgggtccatggagaacatctaggtaaagtcaggatcaagaccacaagctacggagatagcaaatactcacgggttgcagggtcatagcagttgaaatagcgagcaataagaatgtcagttgtatacttagacggcaagccagtcatgatctcgctacggctcatcggcttattgataccaaacaacaaagtcgagcctgatgaatcagtagatggtcgggccgccttgactttttcaaattgctcatcaagttgcttcttgtgcgctgtgaagaaacttcgcacctcggagatctattcgatgagttagaaagactcgagtttggtcaaacctcccagacttacatcgtttaatacagacgcccaatgagcatcactgatgtaataggacttgttattatccatcttcataataccaaacgacttcgtcacctggtccgtgtcgctctcttcggcgccctcctcttcgatatcgagatcatgggagaaccgagtcgagcccacactattttccccggagatcgccgccatggcagcagatggacccgcagactgagagccatttgtcatcaacgaaagaaccaagccttctaaccgatcgatgcggttttgcatatcatccggtgtagtggatgactgctgggacgagttcttcttgcgcgagttgggttgcgcgtagttacatgaagcagcatctcctcgtttgacacagttttcgcaaggattcgtacgattgcatttcagcctagaaccgttagtaaaataaaatagaaggtgtttcagccatgtcttgaatacttactttctgtgtcgacaaggcccacatgacaaaggtactcggtttcgtttccggacaactctgtaatctggagagtggccagcactcgacgaatttgtagaagggggtgttggggtcattttgaatggcatgatcatgtatgggtaaccgacttgttgtaatatcgacggtaatccgcggatgatgcagtgcacgttgagtcaacgttccagctgggcggggctctcaagcacgctgtggcagtccgcacagctctaggatcgaatcaaatatgctactcggttgttctgctagctcatccgaacaactttctcagtctgattgcaagcccacttctgaatatctgcgcggggttccaaacgcgattttgcttccttccctagtcgtagcaaggtatgtacagttgggcgcaacttcaatgccagatttggctcgtgttctaggcaaccgtgccagacccagaacttgagatgtggttgatgttgtacgcgactatttcgggcggtcaggggttaactaagccgcacagtatcactagacagatagcggggcaatgcgacgaacggatgtgcgttgtcgaagcttgcgatgtgcgatggccgaaggagggggtgttcggtgccgcgtggataagtgtggtcgggaggccaagtacagattcgaaagactatagagatattttgattcaagtgcgatcaaggattcttctcgagtcaacgatagcaacaaagaggtgatcataaggaaataaagctaggtagacacctgtggacgaggccccaacgaaatgatgattaatccgttatctccgggcgatttttcttatcaccagatgatctcacctcctgcaagtacatagagaggacggagtatccgcactccgtatatattgtgaaatagtctattatcttcgattcgatacatgaataccttcttccctcttgtgaaagctgatccagtcgatactttacccctatatcatattcattccttctctattttcctagacttgatgccgattggctagcaatcgacgatcagtgactcataggtagaattcaaccagacatgcatgtctcgaattctaccttgtgagtgggatctagactgatgtctagtttggaagttcgactcacactatgtagactgacttcgccattatggtacttgttcgtatattccgagtttaagcttaaaaagaggtgttagtttagtttatttaggtttacggatacgcctcgttttatcgctgtgtattctttaggtaactagtgcatgtacaactctgattaagtaaccctgaattatgtcaaatacacatttctcgtgcacaattcacatactttgtatagacaaactcggtgtcgtttccctccgcaaccatatagtatgcatccaggaagatgtcggtattatatacatccctttttcatcctttatgtctaaaggaacaggtgggttggaaaacgaaccattatcttgatcgatcgtatctgctcccatggacatcttactagctttcttccactttcagagacttggtgagctttcaaattgttgagcttggacatttggctttgttgtatggagcctatggatattaataacttcggggcttgtttagcaaatgactagaaaggcccacttctatattctttggtagggcaaggtggtcgagtctggtgacttataggacttatgtataagagcttaggctaactatggtttgactctatatttttagtatcgagagacaagtttaaccttgttacgctgcgaagggtcctcggttgttgaacgtcgtctcaggtgccgacgcacgggctacactcaaagaaggggtatactaggcatgcactaatatggggaatagcctgggtacggtctaacggacccatattgcggggtttaacgaatgattagcttgcactttgtatagggtactgcttgttggtcgagatacctctcattcctaccaaccaccatcgttcatcggatcctaacatgcacaactgccgatcgcagcgtctttatgtacgccaaaagcattttcaaatgctgacttcttttctttctagcggggaagattacgtatatcgtgggatgtgatcctgtatataacgtgcctcctcgtggcttctattttgaactatgtaggtctaagcaatcggacacaactatggctatcattacagcggttttccctgatgctgcatttcactatattttctatgcagttcctcttctactcctactttaccttgcccataattatttctacaattcgctaaacctctttcctggccctttctgggcgcacctgactgatatttggcggtatatcgatgtgaagggtcgacgccctgagcttacgcatatagccttgcatcgcaagtatggcgatatcgtgcgccttgggccacgcactttgtctttcgcagatccaaaggcagcgaaggtgatctacggtctaaacaaaggattcaccaaggtagagcagtgtcatgccgagcccagaaacatctacagcttctaatcaagagaacagtccgagttttacccagtacaaatgactgtttctaaaggcgagccattgccatcgctgttctctactctagatgagagcttccatgcgaatctccgccggtctgtcaatcatgcgttctcaatgagctctttagtacagtatgagccaatggtcgatgagactacgaaaattttcctcgaccaaacggaccgcctctttgctgatggagccacagtgtgcgatttcgcacgatggctgcaattcttcgcctttgacgttattggaagcattacatatagcaaacggcacgggttcattgagaaaaacgaagacatcgatggcatcatcaattccctggcaaatatcttcgattacgctgcccctgttggtcagatgccgtggctagataagctattttggaagaatccgatatttgacttccttcaaaaattgggcttatcagataattcacaccctgtggccatcttcgcaaagcaccgcatggaagaacgtctgtcagcaaaggctggcttagcagacccgggatcaaaggatgatcttctcaccatgttcctcaaggcgggtgaccttcgtccagatttcatgacgaacaaacggatccttacaatggctgtctctatggcctttgctgggtctgaaacaaccgccatcagcattgcagctgtgttctattatctacttaagaacccggagtgcatgagacgggttagacaagagctggacgacgctgttgagaacggtatcattgtgaaccgcccaacaggacttgtctcatggacagagtcgcggcagctgccctatctcgatgcctgcataaaggaagctttccgtatgcaccctgctgcgggacttcctttggagcgtgttgttcctgcgtcgggagtagagatctccgggcatttcatccgcggtggaacaatcgttggctgcagcgcctgggttattcatcgccggacagatatctttggtccagattgcgacatatacaaccctgatcgatggcttactactccaccggatcaattgaaggttatggatggaatgatgctccagtttggtgccggttcaaggacctgcattgggaagaatatctctctaatggagatttataagattgtacccagctttttgcggagatttgaggtatgttctttttcctaggcggagaccagtgatgctgagttcttgataggtacagctagcacaccctgaccaagaatggaaactgtggaatgcatggtttgtacgtcaacacaacttcaagacgatctttactccgaaagagattatagtatgatttgccgtcatcgtttagctcaagtattgaaacttgggagttgctatactttgtagaaagacatttctcatgaagttcaacaacagagatcttctttctagacaattgtcaggtttaaaaaagaagtaagcttttatgaaatgctgacgtgatacttctttcgggatatataattttgtttctgactagctttgcagacggcgcctatcaattagttaaagatgcggcggtgcctttcttgtatcgtaaccctaaatagagtaatatgctcctgatataacaacaggtttgtcactagttattatcctatagattcaatatcagggatccaagaataaagagcaaagaaaatccccgcccaataccaaccacaccatctgcgcatatttaggctgcaacatgcaactgacctatccaggcccgcctttccctttagggcaaggcgcagctgaactgggctgaaatcattggatatgccgaatcctcgaattcgtaatgtctttacctagcccatatacaacatactacttgaacccatgtacacgcagagctacagcagccaatggaagtatacatctactaactgaaacacagactagaagtacaccgctatatccctatgtctaccggttaaccgtatagactacggatagtcacagtagtagatatatgtgctttttttctttttctaagcagtagaagagctgttaagagtcacaataactatctactatattagcaatcctgtatatacatactaagcccatgatagtagagaatcgtgaggtgaggaagtgtcaaagtgtcatagccacaccattctacagctgcctctgggtacttgcatcgatgtatccaattgtcacctatcttcacactatacccctgctacttggggccagcgcagcaaacaaagaacttgtacaaacgataagtgcgtccactccaaatacttaataagccgtcaatccccattcccgccaatccgcaccgtccttcctttttattttgacgtcctcaaacccgtaaagtcatcttcatccaagtttatcttattatgagtgacaatcggggtcgtggacgtggtgatcgtgggggtgaccgtggccgtggccgtggtgatcgaggtcgcggttccgatcgaggccgtggtcgcggggacagtcgtggtgatttagccctccgcccagccggtagaggcgatggaaatcgtggagatttccgaggccgaggcggtgatagaggtcgtggaggcgatcgtggcagaggtgacttccgtggccgtggtgattttcgtggtaggggtgatttccgcggtggccgtggtggaggagggcgtgggggtgctacaaactttggcccgcctatcttcaggtttgccttcctcactcttcgctgctcatcaaacaaatctaatcctttggctatagacagggcgaaccaatcccaccacctaaccccaccgtcaccaagaccgagaacgaccttgccaaagctctggttgtgagtggccagaagaccgtcagacaggcgaaatatcccgaacgtcctggttacggcacagctggcaggcctgtgactttatatgcgaactacctgccgttaagcctgcctaacaagcagcttttccgctaccatctttccattgcagccgactctgcaggccgatctgcccctgtgggcaagaaggcccaacacatcgtgcgtctgctgttggaggagcacttcccacagcaaaagaacagcattgcctcggacttccgctctaccctagtctcgtgcgtcaaattgaccgagggtaaattcgatgtgcgatacaaggaacacctggatgatgactacatcgatcctccccggatgcaccaggttacttgccagtatactggtgaggtcaatcctgccgacttggtcaactacctgacctccaccaatgctggtgccatgctagaatccaagtcggagattgtagctgccctcaacatgatcatggggaaccaccccaagacggacgatcaggtcgtctctgtcggagccaacagacactacagtctgcgtcaggataccatggaatcgttcaatcttggaggtggcctatccgtcctgcgcggattctttgtcagtgtgcgtgccgcaactgctcgtgtgctcttgaacgtccaggtcaaatatctggcatgttacaataaaggacctctggtcaatgtgatccaagactacggcaatagaaactcttaccgcttggaaaagttcctcaagagcctccgcgttcgcatcactcatatttcccgcaagaacagccgcggtcagccccggcctcgcatcagacctgtctatggcctggctaaccgcggtgatggtggctcggcgcccaacccacccaaggttccccgccacggtgctggtccccaggatgtgcaattcttcctagccgaatccagccctcagcccgtcgccgtgcctggtgcgcctgagcccaagggaaagaagggaaagaaagctcccagggccggtcctgcggaagccggtcgctacattaccgttgcggacttcttcaaaaagggtccgtcgatattttttcctttaattttccttcggctcccttcctcctcgtgttgtgctgactttcctcttagagtataacatgactttgaatgcgaaccttccagtggtgaatgtcgggtctcgtgagagacctgtgtatcttcccgttgaggtctgcgaagtcgagcctggtcagccagctaagtccaagctttctggtgatcagacagccagtatgctccgcttcgccgttatgggccgaaagccgggtcagaacgctcagtcgattgtcaccaagggtgtgggtgtgctgggactaggcgagccattgaatcccacactggtaaacattccctcgctcccaaaatcttgtcaagctttctaactttccatttacagtctgctttcggtattaactcttccacccaactgatcacggttcctgggcgcgttctctccgccccaaatgtctactacaaagacggaaacaggaccaaggagatcaggactcaatatggcagctggaacatgcgccaaatccagttctccaaggctgcatccatgaaatcttggacttacctctacgttgatcaggagggctcccggccagttttccaaaacccagctcagctcaacgcgtctctggaaggcttcagaaagacactcagggatatgggaatggctgtggacccccacaagcttggcaaacgtgttgtcctgaccggcaagaacgacgctcacgatattcagcaagccgtcgtcgatctgcagaaacagcacaaccccatcttcattctgggtatactctacactaaagacactggtgtctacaactgtgtcaagcaagtctgcgacgtccgctgcggaattcgcaacgtgaacgttctcgcagagaagctcatcaactccaacgaccagtacaatgccaatgtgggcctgaaaatcaacctcaaactaggcggtgccaaccaggctcttcgcacccaggatctcggcataatctccgaaggcaaaacaatgctcgtcggcatcgatgtcacccacccttcgccgggctccgccagcacagcccccagtgtcgccggcatcgtcgcctccgtcgacgcaaccctcgcccagtggcctgccgagatccgtgtccaaggcgcccgccaggaaatggtcgccgacctcgaaaccctgctcgcctcgcgtctcctgcactggcgcaaactgaacagatccctcccagagaacatcatcgtctaccgcgacggcgtctcagaaggccagtacaacaaagtcatcgaggaggaactccccctcctccaggaagcatgcaagaagacgtacccagcagaccagaccaagaaaggcctcccacgcctggccatcgtcgtcgtcggaaagcgccacaacacccggttctacccaacaaccgagcaagactcgaaccgcgagaaccccatccccggaaccgtcgtcgaccgcggcgtctccgaggcccgcgactgggacttcttcctgcaggcgcactccgccctccagggcacagcccgtccagcccactacttcaccgtctgggatgagatcttctacccccgccacccagctaacagcaccgggcccggcgcagctgatgtcctccaggacctcactcacaagatgtgctacctgttcggccgtgccacgaaggcggttagcgtctgcccgccggcgtactatgccgatctggtgtgcacccgtgcccgctgcttcttgagtgacctgttcgaccctatgcccgttgatgcttccggtggtagcaccagtggcacggacggcgcgttggaaatgactcgcacgcgggatgtcgtgatccaccctaacattgcagagactatgttctacatctagtctgcttttgagaatctgcgttccgtcatctatctgctatctactatgcgttttgcgtatcttttgaattctgcttgactcgacttggataaatttggtggtggagagaattggaaatggaattgaaataatttgatggaggaatgaattatggatatcatttggacctggaagacctacttacattcgctcgctcatcgttggtctttggaaaataccgtttgggatattctgtctcgcttggcttcgatactggacactggagactgtttcttatcttagacagtaccttagctgtgagactcaattaaatcttgaacgatgacatcttttgtgatccctgggtaggtgtattatattgttctacgctattgaaagtaggaccaaggaatcggaagtataacaccataaattaagagattaacgaatcccgctctcatggaaataaacttgtacactaataacattttgagggcaaggtacagaaataaacaagaaggcaaaaggttgaatagtacacgcaggccaggcattccacactcgactccaactaacattgaatttccaagcgcgaaataaaaggaaagccttcagcctcgattgtcttttttttgtgattttgcagtttcgcggacaaatgtccaaaattaatgcgggtatcgatacatattgttcagaaaaagtcggccgttgctcgtcagaagacgccgctgacaaggatacacacgtagtatcgagctaagccctagaccagcgactagctcacttagttgttgtctccgtggttccagctgggctggttgtggccgagggggttgcgctgcgcagtggcattcctcctaaccggctcgggggatgcgtcgtcaaagttaccccagtgtggctccatcatcttattgtgcttgtcgtggttttgggtaggcttaggaggggtcggctcgtcgtagttatcccaatgggactccatcatcttgttgtgcgcgtgatgctgctgggtaggatgagggggggacggttcgtcatagttaccccagtgggactccatcgccttgttgtgcttgtcgtggttttgggtaggcttaggaggggtctgctcgtcgtagttatcccagtgggactccatcatcttattgtgcgcatcatgtctttgggtaggcttgttctccttgacgggcgattcgtccgtcaggtcgaattgcgaagcgaagttcttcttgcggttggcgacgtttccgcctgttggaaggggctcgtccttctgctcgcgctcggagagctggggctggccgttgtcgtcaaagaggcggttctcgtagaggcgcttgccgcgacccccgaatgagctgatgatccgcccctcgtccgcggattctgaatcggtcatgtcaaagtggcgatctgcgtcgcgacggggcttggccacgtcctgcttggtttggggggatccggcgccttcttcgtcatcgccaaagccaaagtggcgtacttcttgcccgcgtaggacgcgctggcccttcacaggggtctcaacgtcgttgaagtcccagtgggtttcgtgtttggtgttggcctgcctcacttctgctttggcctcgcgctccgagttgtctccgccgatctcgaagtggtcgtactttccggggacggctttgtagtaatggcggtgttcatcgacaggtccggtgcgcgagtcgggcacgtgatcatccttcacgaaaatatcgctgaagttgcgctcggcaggtcgcccagccgagggcgcaaagggagccacaggggcgcgaaccttcttggtaggggacagaagctcagtcaaagaacccgctccgtaggggtctggggtatatttcttggctgtggatggtctgctgggggtcttcgcgccgctttcgggctcagcgacctccttgactggcgagatgagctcggtcagggagtcggctgcgtaggggtccttgatgcggcgcttgccagaggatgaggggcggtgggggagatcggtatccaacttctgggaagaaggctgcgagggggtcccacgcgccgtctcggcgtctctgaggagacggagttggtcttttccatcacgaatgggccactggcgtccgcgcgctccaataacctcgatttgcttcagcaatgaggcctgatcccagtaaattcggatctgcttgatctgttgattggtgtcgaagtggacgatgtgaatctgcgggatgatgcattagctttgataagcgacgcgcgtcggggaatttaccgtgggaaaggtcgcgacacggtcggccaggaaattatcgtcgagtgaggggagataaaccccaccaccctcggtgaattcgagggttgtctccatgtcgagacatagcgagtctgatccttcaatggcgctgatgaccttgttcgatttcgtcttgaccaccttcgcgttcttcaatacatgagtgatcacgttgtcggacttctcgaacttcgtcgtggtaggaacatagatcaaggacacatcgtcggccaacttagcagccttggggttatccaggaaccgctggtattcggtcttgaagtaggacattgtcaaccgtatagggacagggggtttgaaagggggaagatattccagagaagatagctactctaggatactccagaagtaagctagacgatattgaagttacaaagaaactattttccaattgagaaggggaaagagagaaggggagaagggaaaggaagcgatgtcctacgatgcccaagcgcgggagtcccaacgtacattactcggcataaataatatacaggggaaacgccagaaccagttagtcatcggtaccttgcatatttagttaatgcagatataaaatgaagtgaaaatgcagtagaaaacacgctgaagtccctgaaatcttctggaaccgtctgaaaacacgccagtgtttcaccatacgggctaggcttggggcttggcctcgcgtctctccggtaactggagaatctggagaatacactttaaaggcttcaacctctacagggggatggattgcacaggggacatgcagcataatgtacattgtacatttcagaagtactggattgaaatgcccctccagtgggtgacacgatctctggcgagtcgggagtcatttcaacagtctgcaatgccgattattcaaatcagacactctcgagtagaagacatgattggtctttcattgaagtatagccaaagtcgaagtatggcatatgtaccgagtagggacttgtcaaactccagctcctgaccggccaattcatttttttcctgtaaggcagtaaagccctcctaagcacttgtcgtatctttgaggaacgatagatagcatggtaaattatcgtatgggcgaaaaaggtgggtatgtgttgcaatcgtgtctcattacaaaggtctgttgacggaaaccgcgttagaaaagatcccatgtactgggcgtggtcgaaggacttacccaagataatcctccttgatggtgccaatggcattgatagcagccacgtcgggcttgacaccgaggatcttcaaccgcaaactggttcctttctcaatcacttgatcggcatgatcagtgtattgcggcggcacggtgttaggctcccatttgatatcggagggaatgttctgattggttgtcagcagcgaaactcagagatccatggtcagatgaaacaaaacatacctttcgcgcaatgaagacagacaatgggcccgccagggtgaagatacccgtgggcttaacggaggtaacaatggcatcgacctaagctcagtcagcgggaagccaaaggccaaaaccttgtattccaagcgcataccgtctcgccacggaacggcttccagatgatcgcacgatatctgattgtgtattccgcctgtccgattccaggcatcacccgcccctcgccaatatcaaccatgtccatcacacagatcacaaagtgatcacctgtgcaccgtccctcttcctcttcgttgagtcggccgatgaggtactctcgcatgttgggtccgaaataggacgggtgcatagaaatcaccttggtctcttctttgaggaagaacatcgtcgcggttatggttgaatgaaaatgcgctaatgaattgcggagtggaaatattcaagtcgctttcgggacagtgatgctgtcaatcgaggtcgagggacggcgttttcgaccacgcgcgcatgacctgcaacggtaaagcacaaacaagatgtgggatgtggctgctagaaatgagcgaaatgagatccgagtacccgtgggagtggcagagattgtatctgccttggaacttgaacgaggaggcagatacgttgctgcaggcgcaagctttcctttcgtcaagagcatctcgtgggccaggtttgggtgggtggagtcacgtggtacgattcttgaacggtgagaagttgacttgagatttgcacattcaaaaatactgcaacttcaatttttttccggtatattagttaatggaatacgtagccaatattgcacttgatgatgatttagccatgacctggtggaggattagttcttatgtgaggaatgattggatgatctatagcagaccaaacaacatgtacagaagtaaatagtgaactttcctgacttcgctctcgattcagcttatgatatcatttttacgccgtatatagccttgaccggctagcgttgactagttattggttttcaaaaatcggcttggatgtataccgctagctatatatatcagtctactccaaactgctgtcgtcaatttcaatatttacattacaaccgagcgctaaattgacaatatggaaggcatactagatcttcatcctataaccctagggaccatgtaagaaaatacctaaacttgtaggaaaatagtctaaagcctcactggagtattatatactccgtagttaacgaccaatttaatgagatacgaaagagaatcccaattaaaaccactatgtatataatcaattacctgtccctaggtaatgtaggatctcgtggtgaaactataaatgtagatgatctgataggcttgtgcatggcgggttggtgtataccgttacgatgccaagaccaacgtcttctaagcacatgacgccagggccaggacgaagatcaattgcaccactcaacgctttccgataatgagaatgccacttgcctgatcccatcaccccgcaaaactcttcctctagaattccccatctttttgttcccaaaccggcaagatggcgcttaatcttgagaaacagttactcttcgtaagtatccgcatccaattcccagaacgactagagctgactgtgatttagtatggagcctaccatagcaatcccgtacatccgccctaccctcatctcgaataatatcaacgctcactaacagcgtaggtcaacgtcgcaatccacatcacctgcgtcccaatcctactgtttaccggcatcgtcctcgtacgtgcatctcggcattttacaaccgaacgagatattcccagtgtacaaaagtactaatagtgactttcaaggcctgcaactgcccacccctgttcaccctcccggacattatccgaatcgaatacctgcccgcgaatgccggcacaatcggcgctcttatttacgctactttttatatcctcctagagcccattgccggcggtctactcgcacccgccctgatctcggctgcatactacggaaactacttcctcggcacgtacggaagcaccgtgaactactgggccgggggcatccacgtcgtgtcatggctggcgcagtttgtcggacacggcgtgtttgagaagcgtgcgcctgccttgctggataaccttgttcaggctctcctgcttgcgccgctatttgtctggatggaggttctgttcttcttcggatatcgcccacagctcaaggagcggttcgaaaagggcgtggagctggagattctgaagttccggaagcaggggaagagcaagggcaaggcggagcagtaaatgcgggtgtgggtgcagcacgcagcaaggggaggtattgctcgccaagatcgagggccgtatgttctcgggttgtcgcggttggtgttggaagcttcagtggttccatgggcgcgttgattcatatgtcctgttattagcaagcgatttccggcgcatttttatgcttttgcgagtgtcatctcgcattgtctttggccaatggggatatgttgatccctttcccgtggagtggtcgttgctgttttggggccaatgtgtgattctattgtatggtagtatggcaatgccaagtcagtcgactgacttggaaacaagcaaataatactgcgtactccgtagataacaacatcagcatacaaagtatacaaaccgcccgtcttcggttgccgtgacgaaagccatgacataagcgattcacctgaccaggaattccgccgatccgagaagagaaaaaaacggaaggacacccgtggcacactcttccggtcggcaatgcaaatggaagcaactcattctgggcttgtataatattttgaaaaattgggagaatttgtagaaatcgaaatatagaaaagggaaaaaaatacatataacattgtaggactaagaaaagtcgtaggagatacaccgtggctacactagggccacctcggagggcccagggtccgaaacggtttagcgcgagtcctgagaatccaatcctccccccgacgacaaagctctccctcccgtccacaatccctctctcctctcccgttctcctctccccaattacatctctccctcagagaattcatcctctcatcctctgaaccccctttcacaatgttcagaaacgctctgcggtcgtccagccgctccgttgcggctgtttcggccactggccgcatcgcctcggtgagtctatcccatcccagccgccttcgtccatcgccagttcgacatccttcatctcaatcctgagctcgattgatcctcatacctcctcacacctcgacaataatacatcaacaatagctaggacgcattgtccttctctgggatggtcattaacaggtttttcgtcaattacaggtccgcgcggctgctgccggtcctctcaacggcgttcgctcgtacgcttccgaggccaaggctacccctactgaggtctcctccatccttgagcagcgcatccgtggtgtctctgaggaggctggtctcgctgagactggtcgtgtcctgtcggtcgggtacgtcaattctccctaggcggctgggggcgcgaagaaaaattcggtccccggttacaatgccattgaatccgccattatttctcaacattcgaaaaattaccgatacagaaactaattgaacttcaaacagtgatggtatcgcccgtgtccacggcatgaccaacgtccaggctgaggagctggttgagtacgtgaacccccaaagtcttggcattatgcctattcaaaaaactaacttatcttcaggttcgcctccggcgttaagggtatgtgcatgaacctcgaggctggccaggtcggtgtcgtgcttttcggttccgaccgtctcgtcaaggagggtgagactgtcaagcgtaccggcgagattgtaagcacttcaatccaacccctaggttcattcttatacttggacattgaatctatccacgtatggcaattctctaacacgatccccaggtcgatgtccccgtcggtcccgagcttctcggccgtgtcgtcgatggtctcggtaaccccattgatggcaagggtccccttggcaccaaggagactcgccgtgcccagcttaaggcccccggtattctgccccgtcagtccgtcagccagccagtgcagactggtttgaagtgtgtcgactccatggtgcccattggtcgtggtcagcgtgagttgatcattggtgatcgtcagaccggtaagaccgctgtcgctctcgacaccatgctcaaccagaagcgttggaacaacaagtccggctctaccgaggaggagaagctctactgtatctacgttgccgttggtcagaagcgttcgactgtcgctcagctcgtcaagacccttgaggagcaggatgccatgaagtactcgattatcgtcgctgccaccgcctccgaggccgcccccctgcagtacattgctcccttcactggctgcgccatgggtgagtggttccgtgacaacggccgccacgccgtcatcgtctacgatgatctgtccaagcaggccgttgcctaccgtcagatgtctctactgctccgtcgtccccccggacgtgaggcctaccccggtgacgttttctacctgcactctcgtctcctcgagcgtgccgccaagatgaacaagactcacggtgctggttccttgactgccctgcccatcattgagacccagggtggtgatgtgtccgcttacattcccaccaacgtcatttccatcactgacggtcagatcttcttggagtccgagctgttctacaagggtatccgtcccgccattaacgtcggtctgtccgtgtcccgtgtcggttccgccgcccaggtcaaggccatgaagcaggtcgccggttccctcaagctgttcttggctcagtaccgtgaggtcgctgccttcgctcagttcggttccgatcttgatgcctccaccaagcagacccttgcccgtggtgagcgtctgactgagctcctcaagcagaagcagtactcccccatgtccgttaccgacatggttcctctcatcttcgccggtgttaacggtctcctcgacaccatccccgtcgacaagatcctcacctgggagtctgacctccttgctcacctcaagagcacccaccccgagatccaggctaccattgagaaggagggccaggtctccaaggagactgaggccaccctcaagaagaccatcgctgccttcaacgccaccttcaacgcataagtgaagaaacaactcggatgatccctcgtggtcggctttgttttcttgactctatgtgtatagacaagatagcctgtacaattttgagcccattgtttttctgttcttcttggtgccggtgcctggcaggagatctcagtctgcccctggatgtagcgatgtaattatctgcatgatcctggggggcggaccaaggatttctcgtagtgctgttcgagcgagaactcaaatgactttggtctgccaaaatgtgattatatcctgtacgtttagattttatccgcgcatcgggggcgcgtgatgggtggacgaccgttctaattccgtctggtctccttatgctctccatgttggacctcaattattttcattttttcattgttatatcgtaattctagactgtagatttggtttgcacgactgctagacgtagtattccatcggatgtaccgggttggagatatgcgaaacatggcaacttcagtctagatacacgccaatcgaccgacggaactgaatataagcctatttttatgcccatttttacgacattctataccacggcatatcattgaaaagacacgacgacccggtagtagaggccgaaaccggcatccgatttgttatcgataagcgatcaagattttcccggagatcaccaagtcccccgcgtgcaagcaacttcgcttttctctgttactgattatatcgttattatcgctctatcgccgtcatgtctgcccctaccgataaacctccctcctcctgcaaggtgatgttgagcaagaatgttgccaaccatctcctcaccgaagtccacgagggccttaagaccctcgagaagccgcctcacttggtcggcctgctggccaataatgaccctgcagcgctgatgtacgcgcagatgacgcaaaagacctgcgaggagaagtgagtctctataatattctgattatccggctccaatggatccaatggcttctttggtgggggtagctagtatgattcatacatacccctccgccaacaaaaaaaaaaaaaaccaaaaaagcctagaacgaccctaaaagcacagccaacacctcaaaacacaaccagaaatccaattgaagcaaccgactaacgcaatgcctttcccagcggcttcaagtacaccatgcgcgaggtgtcccgcgacgatatcgaacaggccatcctgaacgcaaacaccgacaacgacgtcgacggcataatcgtctactacccgatcttcggcacccgtcaagaccagtacctgcagcagatcgtcgacgtgaccaaagacgtcgagggcctgagccaccgctacatcttcaacatgtaccagaacatccgcttcctggacggcgaggccaagcgccagaaatctatcctgccctgcacccccctggcgaatatcaagatcctcgagtacctcaacatctacaacacaatcctgccctacggcaaccgtctcttcggacacacgatctgtgttgtgaaccgctctgaggtcgtgggtcgtccgcttgctgctctgctggctaacgacggcgcttgtgtttactcggttgatattactggtgtgcagaagttcactcgtggcgagggattgcagaagaacacgcatgaggttgttgatcttgagggaaagactttgaaggatgttgtgccgctttgtgatgtggttatcactggtgttcccagtgaaaagtacaagttcgatacgagccttctgcgtgagggtgctgtttgtgtcaacttctcaagcgagaaggtatgtctttgtgtttttaagtctggttatgaggttgttgctgactgttctgatatagaacttcccctacgaggtccgagacaaggcctcgcttttcgttccctctattggaaaggttactattgttgttctgttgcggaacctgctggtatgttttatctctatacttcattcgcatgctcagtggtccttggtaacatctaacatgagaaattacagagactcatccagaacaagcgaatggacgatgtcaagcccgccgaggctacggaacgacctggcaccctcgaggcatcatcgtaggtcggtcaccaccggttgaaatttcaatctcgatggccatgcattgagctggccatttcgtaaaaaaattatagatattctgtttgttattagccatttcgattatactctgagacttatgtttcttcttttgtttcctgtgcttagatatccagtcgcattccatggttgaaacttatagagattggctctgttgcctttgtctattcttctaacaaggactgtttcttgtttaataccatagcttgttgtttacactctgactttgcataatacctcaatagaaaactgctggcgggctcgaaggatgatattaatatactaacaaattgccccgagaataattgggactggtaacactcaaacctgtaacgcgcaaagagccattcagttcaccttggcacaagcttaacgaacaaagacaagaacgatgacaagaactaacaggggaaaaaacacaagagaaaacgcaatcaggaaccaatagggcttcaacagaagaagccaccaaatgatgagatcgccccagtcactctcccaatctgcgaactcatcagccccagtcagaatataccttagcgactcaatcgctgacagttgactattatcactgatagcgaccttctggaggagttctgcaggaaacaaaggcgtttccggcacgagaatgacttgaacgtaagggcttatagcgctaggacccacgattccgatcatgcgccgtgggacctgaagcccaggtgccaggacgatgaggtggatacaacaggtgtaattcacacgccggtcgagtctctttgtctggatacagtagaaatagccatgtgaatactgttcggcggtgcgctctgtttcttttcctccagactcatccacggacggcgtagttgttacattggtcatctgttctatagtgactgaacaggcttccagtcccttgatttcaagggtctcggtggcatccacaagcgagacaatgtcttcgggggaaacccaggcaatgactactgggaactccgggagagctgaaatgatcggattgttagttcagtttctcactcaaacaccgggattcggcgcggcgagagcttaccacgaggtcgacacagagtagatacaatgtatcccatgttggtggtctttacgactgtggaagatagttgtgaaggagttttgatgattcgaacttgattgagagtcaaaccatacagtctaagagcaagtgagcagcaaggtgcaaagttgtccgaaatctaacatcattaatccccaggctctgacttggaaggttcgagtcaacccgaggtctctccaagttgggaaagtgcagtacagctccaggaagtgatccacgtgagctcaatagccctagctaggacatcacattctaacagatcaggctaagacacccagcatataatagtttttctctcatgtcgagtgaggtgcaggtgttgcatacgagattgctttcactgccggtcgatagtgatcaagtcacgtacactgttgggatgcttctgattaactatgcctagtgaaaagaaaaacacagaagaccgacctcttccttgctcatttgaacatgtgatacccatgtactctcctcaatctctcttagagaatgaactggctttgcagtttgcaataaccctgaaaacataatatctgatagtaattgataggcaaccttcctctagccaaacttcttctcattttccttcgctgccaatctcaaaacatcaatctcgctggcaacccagcgacggaaaggctctgggtggaatacaccatctaccgagaaccaagttgtgaagggcgcctcacaccgcttgtcctggagaaccttgccagaggcggacttataaatgacatgcaacttgtagagcttggagaactttttggttgacgatgacacagatatctataaacaagtcctgttagttacctggccaaaaaaagaatatcagaacgaagactaattgacataccgtctccccagtcttcctcttcccggaatatacctcgccagcctcgacggcccaaatccagtatgtgagaatggcgttcaagaagaagtatgtccctactgccgcgataatccagggcgaggtagttgcttcccagccaagcctgcggtctgcatagaaagtaaaccctgcaattgcgacagcactatatccaagcaagaagcgaatgttcgtcttcgagtagtccggtgtaaaagcgtatggcgcgggaaggttggtgagataaggaagcagagcatcgtcgctcgtagatttgagatctgttgctcacgccgttagtgttgttgctgtatagagtatagcgggattacgtaccattggtcgagtagaccggcaccttgctggaagccataatatattcgagaatagatgcgagtaaagagctttttaaaaccaaaagaccgagtgtggtttagcagactgttgtttaccgcaggacaaagatgcggcgtggcccttgggagaaagctggagctaacgcgggccaatgacatccctctccgcctggcaacctctccttcgcggccccttcaactttccatcccccacctgcagccaccactaatttattgttggttcgaaggaggcacttcttcgattcttattctgcctcaacatggcaattcaaggggctgatcagaccatccttagggatccggcattattgtgagagaacatgattcgatcaagcggaagttggactgaccatttgcttatagctattggattctatttcccatttcaattgttatggtatgacctgcactcggtgcttgaagctaaatattcgcgatgcctctgagactgaaactaacctctcttattggatagatactgactggaatccttcgccactatgctacggtcctcatgaacacgaccccaaaggcgccatccactcttgccgagtctcgcgagcgccttgctcttctccgcggtgtgaatctccgcaacaatgcctgctccgtgctcgaccgcgagtcctttgagatgcgcaagaactacatggttactggattccgcaatggcgcatttctcaaggatcccaataatcgcggccaaccgcccgcgaaccccatgactgatcctgcgggcatggaagctatgatgggaatgcttaagggaaacatgatgatgatgatcccgcaaaccctgatcatgagttggatcaatgccttcttttctggctttgtcatctgtatgttgcaatttgatataaaacatgagcaacgagcttacaaattctgaagtgaaattgcccttcccgcttactatccggttcaagtcgatgctgcagtctggtgtcatgactcgcgacctcgatgtgcaatgggtctccagtctttcatggtacttcctcaacttgatgggccttcagtccgtttttggattcatcctcggcagtgataacggtatgcatcaatctgaccttcccaataagagttctcactaatatttatagctgccaatcaaatggcccagcagatgggtatggctaaccctgccgcaatggtcaacccgctccagcccggccaggatcccgacaagttgtatctgaacgaagcggagaacctggaggtgatggagcacttctgcattctcgatggagtggaagagagaatcttgcaaaattttgctcccgcagggatctaatttccgttttgatgtcccatgtgatgtctagtgttggtgtatatacctgtcttgaggtcatcgctggttttggatagcatacagaatagaatgtgccatctttgtaaacaagccgtaatctcgtgaccacatgatttactcgtgtcttctcgaatgatttatattgctcaatttccatgactcgtacttcataactaatctcaatcactcctggtggtaattaataacatcgttcagaatccagacttccccattattgaccttctctgcaattgaatcaacttcaatattgccaggttggatctatagacagtcagttaccataccaatgacttgtaggggataaaacctacaaagatcttatcaccctccttcgtccatttcaacttctcccctgcaagactctcaacttcttccccaactctccaaggactagccgggatgagatgggcctctacgaatcgctgtagattccgtttcgcccggtcttgaccatcctggccctcatatgcatttacctccccgaacttcttgtaatcctctggattctcccagggcttccgtggaagagcctggattgcactgttgcgtggtgctagaactgttatgttcttggacgcatcgttaaggcggctggcgatgggatcaaagtcacgggtcaaccgcgcaaagatattgatgcccttggtcttgggcaggacatctgagatgacagggctagcgctgtctttcgaggtcaaatcctcattcggaaccgtcttctgtggctggacaacaccagggagaatcttatccattatggatcggtgctcttggtgctcgagagctagtggctgttgacgcgaagggaagggagatgataggccccaaagtgcagatgcagatgtagcgagaagaaaagtaaataaaatggatgttagtcgattcgatttcatgctgcgggttggagccatcttgctgccaatgatgctgggcagcgaagcaggtctacaaccatgacgcaacaggcagtggcacgtgatgtggagagataacagaatcacctgatccttatcgataagggcatccggccacaagaaattggccgatgtgatcttgatctttccccccgcaatctacacctgggtctcccaattgatcaattggtatcatgtcggctttgcagacctttatgctggtcgtggaccacgacaaagaagaagccaagcgcattgccgagggaagcgcgcatggtatgctaattcgccccgcactcgagcccacttcaaatcgttgcattactaacggaagcgatagatattgagattaaaaaagtgactttgcttgatactgtccaatctctcggcgaatatattaacgacgaagacccgatcttacgtggaaaagcgatttccttccttacggccattatccaagccctctcgccgaaatacctctcgagacaacagattcaagtcctgactacattcttctgtgatagaattgaggatggaggtgctgttgatgggctgcaggccctgcagggcttggaccgttttaacaagtttttggctacccaagtagcgcaagcgtaggtgctatacttttacatccctgtattcgccggggataaagcttaactcaagatgacccagtgctgatttattgatatagacttttttccaactttcaagatctccagtctcggtctcaaacacaacgattccatgtctatgaattgcttaatgacttgatgtcaaaccaccgcggagctatgcgtgatatgggagatatctcgcttctaggtgttgttgatattatgacgggagagaaagacccgagaaatttgatgattgtattctcgatcctgaaagtggtcatggtggaatgggacatttcgaaccacgttgaggtatgtgtaatttcccaagctcggcgatcccgctaacactagacagactctcttcgactcggtatataactacttcccaatcacattccgacctccgcccaacgacccttatggaatcaccgcacaggatctgaagggtcgtcttcaagagtgtatctcttcgacaaggcattttgcgccccactctatccccgccttattggacaagcttgattctacttctcctaatgtaaaggtaaaattgctcaacactccgtgattcgaaagccgtctaataaatctatagaaagatgcacttaatgcattgatcgcgtgtatccatttatacgaccccgacacagtgtccaggtattccattaccatatggggagtcctcaagtttgagattctcaatgcccaagaggagttcttatccgaagcctccctcgaggctctgcaagcaattgcccaacggctatccgaaggagttaccgaagtgtcgcaagaattgcctcttgcaaagtaccttcagccaatcaccaaggagtgcaatgagcaactccgggagccccaaaacaagaaggccaatccggcccaatcgatcctcagctgtgtgtctgctgcttcgcccgtttcctttgtccttgttgtacaaacagtcgtacctccgattttcacactttaccaagaagcagacggaatcgtcaaacaaagagcgcttctcgaaactttgaatgtcttgttcgattctgctacaaccgtgtttggacaatggaccacccgagggggtgaggcggctatcgaaaacccgctactcgaatttaaagaccaattctcagacctttttggtcaggtattgatgggtgcagcaaaggaagaggtttccttccgggtgactgccttgaaaggcttcttgcgtctgtcgactttgcgtgattacttccaggagaatgagattgggcttttcgtacaataccttgacgaaatccttctcaaggaggagtccgtgggccgggatgatctcaagaaagaggcaattgctgcccttgctgagatttccaagcacaagccccgcctgattgtggatatcactttccctgcatttgtggcaactctgccagaggaagatgaagggtcggatgcccggtatctgccgacactcgagacccttgcccagatcagcgtcgagagggacatcttcgagacacttttccgtcgtcttttcagcaaactgtccgttctgctgcaaaaggaggaacccgggtcagttgcttacccacgtgcgatcctcgccaccttgctttatgttatgcaacagagaaacatggaacaagaccagagtgtggatttgtacttcgacaaggttgtggttggactttgccgcgatgtcgcagcatcggcttctggcaagaccaagaatcggattctcaatgatcctaccgtgcttgacactttgggtcgactctgtaatctccttgtgcggtctgtttccattcagaaacaggagcaagttgccgaaaacgtctacagcctcttctctgcagctggagatttcgtgcctcttccgtttactcagactagagaagccgatcgagaacgtacgatcattatctcgacatacctgctcgcgggattatccaaggactatggtaacaagatcccgcacaccgacccagacatggcggggttgctgttggatctgatctatcgttgtgtcttgagcaccgaaccagcaacacatcaagcctacctgcgccacctggccttgctcgtcaacaagttcctgtcgaagcaggatgtgccaatcgccgagagactcattgattctctcctcgaaggcgagaacaccgaattacagagcctcagtcctcctatcattcgcaccatcttctggctatctaaagccttgatccttcgcttagcccccgcaacaactcacatcctgacctccctcctcgctctcctctcctccccagaccaagaaaccagcgcgacggcagcacaaggcttctccataattctaggcgaagacgatatcatctccgcaaccaatggcgctacaatccgcctcctgtgcagacagcgcctcttcacaacagtcatccctttgatctccactcgcattcgcgaggtgaacatcgccggcacagatggctcccaccccaccccaaaagcgcccgaccatattaaaccagcgcacctaaccgccctcgcgggtatcctctccaccatccccacggccctagtcatgcctgaactccccacccttctccccctcctcctgcaatccctcgacctccagaccgccgactcggtcgctgtccgcacagcaacgctcgacaccctcgccgtcatcatccgtgacaacggcgtcaccgtcatcgaccggtgcggccacgtccagagtcttgtcacgagactcctcaaaacaacatctacaaatatcggccctggtgcggttaacagcccccgtctccgcgccgatgctttgaaatgtctcaatctcctcgctacgcaccaggtgcccggcgctgcagctaatgctccgccgggtatctcgcctctattacctgtcaagaatcaggttctgaggtccttgcgagccgttcttgacgaccctaagcgtaatgtacggaaggcggcggttgatgcccgagccgcttggctgcgttgtgtggatgatgccccggacgaggaagaatgattatttttgggttaatggaaaaatatactcgcattaaatttagaggttgtttattatcatatattgagcatagatggacatcggggtttccagttctcgttggtgtaatcgcagaaggaattcgagtgcagtataaaattgtgacacctctgctgtgactgtaatgtgccagatccgaagagtaagagtacatctaattcaaaccaactaagactgagagaagaaggagagagcaagttgagagtgaatatcagacatctcgcttagctagtaaacattctatggacaaggaaaatagcaaacagggagcaagcaagcagaacaatagctgagtcaggacagctataatagtaattgtaaaccccaggagaatgataatactttctgagaacatttatatatcaaattcggaaatgacttgactatatcttcaaagaaagagctctatatatgattgacctgcacccacagcgtctagtctcacttagaaatgcctcgcgcgttccattagatagaaatatatcaagtgaccacaatctccggtatataaagtcctcgtcaactaccttccaagcttccatcacttcccagtctacaaaacagtcctggggagcatataagaactgcatcatttcaatatatcaacaatcatgatcaatatatcctgtttttctctgtgggcttctctgtcctgtaagtttggttcccttttatttcaatctcttttttatttgtctctttctaacttctagccttagtgcccctccagcactgcgagggcgtagaatccatcgggcatctctctcttgaaatcccgaatgggtggcgttcaatgcgcgatgggtcatccagctcccggtatagcagcgaaaatatacccacccacaaaaactttaatgatcactatacctccaaccaaccgcgattctgcgccgagcgaatttattcttgaggatgtggctgagctcgtccgaaggaactgccggcgcagatggataccaggctcgctgggcatccaaggttgtcccctacgtctatgggtttgatgtagccaagtcatcgctgaaatggttcaatgaggtgctgaagaaatccatcgaactcttcatcaacgctgcatacggggatcggctcaaggtatacacgcgggtccgcgctgctgctcttcgcgaaaattggaacacgcttaagtctatgccgatgctgacctacccgccgtttccactctacgattgctgttggcacacctaggcgaagagattcgagagaatggaagaaatccctggcattgacgacctccgtgtctaaattcaccatcgaagacaagagcgaggctggtctcacattaccgcagagggccattacttcaccgataagttcgaaatacctggccttatgcacgagaacgacctacaaatctccttgataccacaaatacgaaagaggataaggacgtgagaagagcagaaaacgatctgcaggaaaaccaaaccaaattcaagggtattccgttttcctggaagtcgtcggcatggcgaatctcgccctggtcttaagggatactcctatcattgggagcgttaacggaaaaccgaaaaagccttcaaccattgcctccgaaatcgtgggtggcgagctttaagaatacctccagcatattgaaaatcctattacaaagaaagtcttccggaaaacaggtgcattcctcctcgtcagaggcgcacaaaacagaggttttccgaatcggattctgttaatatggaaccatcacaagcattgcaagaaccataagccgaagcacgggacctccaacagacccgacttttcattggcagtgaatcaaaattgaattccgatgtccgattttgggggaactgttagatcggatcatcagagacccgcgatgctcgctctaccgcattctccaccgcggtcgaagagtctcaactcttcacgccagctgagcgaagaatgggagccgggagccacgggccccgaaaacatccccgacgtcatagggcttcaagacgcaaatggcaaaaccaaactcaaggtggttggagagttaaagataccctgggtcgatgaggatcctctagtgtccactgctaagcaaagtgagcttcgcgcaacctctgcgggatatgcagaaggagttgaccaccccgaacagctttactaccgcatccttgacgccgtccccaggatgccagccaggggcacctacaccccttttcaattcgcagggggcctgttacccacgtgactacatagctatagccccgctactatcatagacaatacatcatctatcttcccctgagctaccagcgtgacagggcctccaggatcatgtttcttcccctgagctactggtggatcatgaaccctcatgatggcaatgcgaagatatgttgggtggccagcaaggcggtcacccagtggagccagatcccactattagatagaccagatagttccgtccttcctcccttgtcctctcctccttgtccatcatcagcaagagctgccggagcatgtcacatgagatcaatctccagcaggaggtgaaaggtactgcacgtgcccgtacagcaacttcattcggaagcggagctggtactaccactagccagtcctacaccccacgtgtgaagcgcgaaggaactacgtcgtcgtccggactgtcagccatagaatgggagaccctgatgaaggagggccgatggttctactgcaaagagaaaggacacatgacgtttgaatgtcctaagaagaaggcgaacgtagcccaacaaaatctactcctgtcttttttcttacgatactatccatctagtagatctctattgatatatgcttacctctctggatcaatcgatatcggtcagaaactaggattgaaaagccggagaggcaaaacaacagggccaatcgctactaggtcaacacacgcattgagccacttcaccttcgagatctataccaaatgagttgcgagatggaatccttcctgataaagtgggaggtaaatgtgttggatctgtacataatattaatacctacctaactacatcactggctacatctgggtacttcttataacaatcctggctgctccgtcaacacatttatggtgtaaacttcactacctcagcccagtttatcttctataaaacggactggagtactcaataatactgtagctaaaaccatagggccaaactacacagctccataaagtaatcaaacattgtttttttaatttttttggtgtcttaaaatgcagtatcaatggaaaggatacaatctgtcccgtttccactccaacccccgagattcatcttcatcactgtctcatcaccacttgtgctttcccttcaattcagttggctgattccagggaaccatttgtttgcccaaggtggatgacgccttgaccatacctgtaccaccctggctgcgaccagtcgatgtgttagcacgcttgtcaagactcgcaggacctctgttccagtacccgacagcatcgatcttctgcaccacggttttggcaagttgtaacattgctccaattcctgaatggccgacttcgcctccgagggtgctcagcttctggtttatatcagagggaaggaccctcctgacatctgcaccgagaagatctgttgcacaccaggactcgttgcgatcaccgggttcaaggaaggaatttgatttcatgatgtcgtccactttgctgctgacaatcgaggcctgccaccactgctttccatccttgaccatcttctcaagcgaggcgttttgcaaaaccgtgatactaggatcaaagacggatggggtggcgaggagttcttggctttcgctgatttggagaaacaagcctttgctctttttcgagcgataagggtgacggctccatcgttccatgaacaccttctcaattctgatctttgacgccggaggagcacggaccagcatacgaagatgtttattgtttggctctacccgaatgcttttcgccatcattcgtgcagcttcgtcaagctccggatcagcccccgtaatgtattcgatgtaaccatgtaccctagcagctgcatcccagacttgtgaagggcaactcaagtgcacagtgcctagggagacctcgggatagcggatcatagcgtgtccatattcattgactgaaataacaatggttctgttcggaccaacgcggcaccagaattcgtactttacgcctcggtggctgtactttcggtcgaacagacgagattggttgacctccaaatcgatgaggtagtcaatatcggcaggagatgtagtcaagcgctcgaagaatgagattggaggcggcgtcaagttattcttagagaagaacagctggtgaacctccctatagctcatctccctctctttggttgaagccggtaggctgggcatgaacataagcccgaactggatttcaaggctcattgctccagggaagctgcgaactgcatcaaggattggttgaagaaaacgaaacaaattctctgttgattcatgcatctgcttcttttctcttgatttcgcagccatcttcatggacaaagcagtgcttttttgtggcagtgcttcttttgcttttgatcctgttcttcgctgccagttattagcaatgggggcttgaacgttttctccgttctctgcattggttgtgctgttttcattcccctccccggcattagcagtgtggacttcaatatctgcccttcccacggcattaatcacttcatccacccattgaaaggatttgccgcaaggccgctgatgatacattgacctctggaattctcttgtctcagtttcatccgagacagcaagcgtttcaatcacttttgcttccgcatattgctcaccatcttcagagttggattgcaaaagattaggcaagcgaggataaagcatctgaggtgagatatcaatgaggtccgggcaaagagatggcacattctcaacccactgaccaacgtgttgacgttgctggatatcaccgtgcggagcactgccacccgagctaaaagacagagctcgaggtacagggtcacaaaggctagcatcaagaggtatcgcaatctcctcaatgctgggaattcttggagtagaattttccttgatttgctggagcaaatattccagtgctacctcatcggccttgctgcggaatccaggggcctgttcatgttcctttccgtcgtccgatgcggcgctcttatgatcagagccagaaacttccaaatcaggcaatggcgcacttgtagcgagccctagttggacaggctcactagtaaaagaggctggagtcgtcgcacggagcagcatcggatctttatttaggtcgggataaagagagaaactctcagttagctgaggctgcatagctgtatcctcgatattgggcatatcgaaaatatcaccagtttcagtaaaattgcgagccttgacatgctgagcatatgtagattgctccggaccacttgatcggactgtggctagcggatcgaacgcaacaatatgttgtaagccactgttgagactgctcacttcacaatcaagatcgatgagggggcttgtgttctccttttctctttcgctgcgatccagctgggtggatgtggtacttggctgcttttgatcccttatcgttggattgttggacacttcgtctattccagtttccctcgtgatcttggtcttctcaagaattagctttatctctcccatcactgaatcaacacttcgcccttgagcctttgtattcacctgtaaattcactggctcgagtgtgccgaaaagctggcccttcttgactcttggagaacgaattggtcggctcagagggctatttagcttctcttctcggttagcgggagagatagccaaatcatgggacgtttcccccggttgtttgggtgctgtgcccggatgagtggataggactgggcgacgaggggtggcatttgagtctgattccctagtagagatagaagccacaggaccggttgcctcagacattgtttccggttgtttggaaactgcatttgaagcagtaaagtcagctgcgctgcggactatactcgccagtcctttttgttgagggactgagatagacgaaccggctacttgttgctcccttattctctctctgtagctgagtctgccaaacagagagatatttgggctatgaggagtgtctggcttttcttgttgagactggttaatgggtacagttccatcttgtagcataatcacgcgtcctttgacgccagcgggattgggcttgaatggaacggactgtctcttctcccgtggggcggaaacgctgggcgcaggttggagcttggatttaacaagcgtaggggaggtcgtatcatcttccagtgatgctcttgtatggatgttgcttgccataggccgtttggtgacaccccgagagatccatttgtcgacgtcttttgccttaccagtcgagagatacgggtgcttagtgtcattcctctcataaagggcctcacctttgggcgcgatatgttgatcaatatcccccagaaagggatcgtttctcgggccgatctctggaaaatgataatcttcccagtctctaataatgctcgctttctgagccacttgcggtggctgacgaagtttgcgaagtggacaatattggttagctgactcgtcgaattcgcagacgaccagagtcattatctttgggagacgaagagaggcatttaagtcgatcaaaatacgccacaaggcagtggtactgatctgtgcatatgtcatgatgcgaaaggtagcgtcctcctgttgtggagtaaagacgatcagtcctcggtttgtgttctcaatgagatcctagaaagtattaacatacaggacttcgaaacaaggactcgggactgtaccaaacattcttcgaggcagtcgagtatatccattgcctcatcaatgttgttcatgtattgtgcagagatacggagccctcgggctccctccactgtgatttgtgttttcgtcattttggaaatgcgaagtagaagagcgtccgagtcatgagagatggggcccgttcccatctgcgagggataccagaatttgacaatgagtccatcgctagtgggttgtgccggggcaatgtcctctactagggtttccgtctctgggagcgcatcgctttcgtggctaggaaagggattggggtcgaagaaggtagagattggaagctgacgaattctcgtcgtcttgggtgaagcagatattaggtcaatataacttagaaattggggaggaatcaagacatacctcgagcagatcatcattgcgatgctcttcaatgtaattcgcaagcagcgatgtgattttgacatcaaattcctcattgaattgacccgtaacaaccaagatctagacacaattagcaaagtcatagcaaatagtacaaataaatagtacagaaaaacctacatgtttatcacgttgatattcgaccttgatcgaagcaccgggattcaatgctctatgagaagtcagttttgatcaagataatatacatgaatagtatgcgtacttgagtttgtctcggatttctgggatctatatcgagtccggtcagtcctagtcatacagaatgatgatcatgagatgttaaagtgtagacttactccttggtcctccagtgaccacattgaagtcaaatgaagtgtccggctattagccattttggacggtgtttgagagatatgcggagttgaatgtattgacgtgggatggatgtgaagcgattggagaccgacgtcaggtgaacggatccaatgacccggagacggaaggttttgggccttcaatctatttgaagacgttaattgggttgaaaggggaatgaaagaagcaacccagcaagcagtgggttgattggacccaagagaagacaatcaattaagtaagaggtaggtgaaggcaagtcgagtagagaagaacaagatgagcctcacctagataatcgatttgatagaacaggctgtcatgaacggtgcacatgagatgaagataacggacgaaagacgaggaagagagaagagagaggaagatgatgagagtcaaatgaatatgatttctattattcagcgacgatggaaggaacaaccgcgtatatcaaacttggaagtcagtagcaagtgacggaatgtgaacgcgcgcagtgctatcttgtatccaggacgatgagattggagtatagcaattcaggaatatgcggagtgaatacatagggcaagttaagtaaagttgaaagagtataaatttctgagtcaagcgtaataaaatgcccataacatctaggcagaaaggaaatatgcagccactctttaaaagccctttgaacacaagcaagaaacaagacttgccatgttcaccacggtgtaatcatgtccaggtaaaaatatgcaggtcgtcaaacgccatatctaacaagggggtaacagtacaacaggaaaagggtgaaaatgcagagtaagaatacaggaatacaaaaatcgaagggcacacgaccggaattgaactctgccacgggtatctgctgcaaattgaaatgaaacgccatgcaccggccaagaatggtctatgagaaatgaacaagagtggtaggatggttgtcaagacgggagttgggacgggaaaagtattgtccggcatcaattcggtggtagattttgaggaatctgagcagtaaacagagagaagagggggtggagagagatacttcgcatgattgaggtctggggttgacacaaacaagagacaacacgaattattcgccgctttgttcgctgctttgtcgacttgcattgagccggattgcccatttcatttctgtctcggtctccttgagctgagcaagaaccccagcgaccatattattgctggccttggccgactcaattgtctcgcggaagtcgttatccttcaattccttatatgcggagtgttgggcgagcagcttgtcataagattccttgagggagtcgaattccctgttcttctgatctgcaagaacctccagcctctcggtggagagtatatgtgtcttctgcgcgttggcgagagtcgtgaactcggcccatatggcattaatgcgttttgcaaactccgccttgtcgcgtttcaaagtgccggacaatacatcgtactgtgtctcgtagtgtttggcgatctctagtgaccgggcttgttctcgattgtgattctcgcgctcctcctgcatagtatggttggtctggtttgagttcatttccgcgtcctgacgcttggtgcgctcgtgctgcagctctattctcatttcctccagcttccggtctttccgtgcaattgagttgaggttggtctcgttgacttgctcgaggtttcgtagacgctcgttcatgttttgctgctggatcttgtaggcctcattggttctctggtactcctccgagcgggacttgtagagtgtgcattcacgcgttaaccgtgctatttcttcctggagattgtggatcacacgtccggatttccctgtcgctgcatggccaaccgctgaccattctgatgtgtgggaatcgccattgctcgtgtcgacggaggtagcggatgggtttggagggttcgaatgagacgagagggattggttatagtcacctgcagggtggagattgtaagcttggaaggtagagggagtgggtttggaatcaccaaccattctggccttcggtggctggttcgtcgtcgaggagtccgttatgctggtgcatattcaattgcgtgtccacatgcgggagattgacttgtggcgcttctgcacggataggggggtcagcagcaatcggcatgagatttttgctagggctgagacgcttcatgacccgtttgaagccccccatggtgaccacccgcgcctgtcatgaggaaccagatgggaagagcaagatgggagcaaaaagtagtgagcctgtgaagggaaaggcgcataccagtattagaagtcaattgagcaagatgtgaggtcgttgtcttatggtgttgcttattcatctagacatcgcaaggagtgcctctgatcgataaaggcgctgtctcatgagatcttcaaagatcatcaaagatcactaaaacaaatgatctcagcagaataatccaaaacaatgaagtagcggtaaagggttgaagaagtgggagatcagtcgatcatcgttctttgtgttccaactccgcgtccgtcagggagcgccacggcgctagcggcgagcgacaggtcttgttttcttttctttgctttttcttgcctttctttttgtttgtgacgcattgaatatgctaaatgtgaattgattacttcctcaatgccttaggccacctatatatcaacgatatctgatatccaggggtattttatgtacaggaagttataccattttgttttcgaactccaccaaaacaccgaagataagaccgacaacgccaaaacagatgattgacctagacaaggcaggccaaaagaccggcaatacccatcaccaattgcacggagtattgtgggatagaagcagcaccagtctgcacgcttccggttgaggatgcttttttaccatcgacaacctcggtgctggtagccatcggcttatcggttgagctgacgtgagaagagctagaagggctgcctgatgagttgacagcagagttgatgagggccttgctggcagtgctagtcattgtggtgtgggttccatgcgttgtttcggtagtaccagtggtctgggtgttaggggcatcagtggtctgggcagtggtaccagtactagtgccagtagtgttttcggtgccagtggtggtgccagaagtaccagtggaggtatcagtagcaccagtagaggtaccggtggctgcagcagtagaagtagcagtgccagtttcggtggtatccttagcctcgggaatatcggccgcgggcttgccggccgacttaagcagagcggtatagttagtctggtctttctgcaagatttggaaggcataggtgtcgcccgatttgacatcgttgtcaggagtccaggtgaaggtgccgccctttccatcggtagtgattggcttgacatcctgcagatcgcccgaggaaccttggcggaggaggatggtcacaggctaaacggggtcagatttgttatgagacattggaaaagatgcgtattacctgaccaggagtcgcaccagtccatgtgagggtgaccggcttgccaggttggagaggctccttgggccaggaagtgaaggatagagggtcggcagcgagaccaagggacacgaaggaagccgtcacggcaataacacccttggagaaatacattgtgataaaagaaagtcaatagttggttggactttaaggaaagtaaggtagttagaagattgtgttgtattcgtgacctgggtgagccggtgacggagaacgcgatacaacttcaagaactggcgcatcgcgattcttaactggcggcaagaattgcccagatcccctccagccccgtaggagtgagctcgaaagtcgcctgttggtattccgctgagaccccaggggcgttttggagaatgttgcattccgatagccctaacagcgaagcatcaatacgttacctaaggaagcatgtctctaccttggctggggaatgcctactagtaagaattggaaattctcgagacgaagatagttcaaaacttgcctaggggagattgatcagtcattatggtgggagggctatcctgtatctttgatcgtactaactaggtggccgcgagatggcttcatttttctaatagttgccgaaagtccacaagaatggttcgaccgtacaatgaaagactcataactcatcgatgagaagacccaagtatggtagcccaatagcacgactcctcgcgacatgctggaatgctatccctttccgggttgttttggtggggatcagtctatagggctgcggcgaacatcaagatcatttctggtgtctataaagcatttcttaggtcttgttatactatggatctcataccaaggggtgccatatggtgtggtgcaatctaaggctggggtagcttgatcgccatctatacagcacgaggaataccaagtatttccccagccttccaacccaatgacccagttctagagatattgcaaggcctaaactcatatgggataggaaataagattagcaataacaataatggtacggggttgaatcgagttgatagagtaatgtatacaaccgtgctgcggaactcaagaatatatctctcatacgtgcaacatatgctatgtctcagtgccactctagcctagcctatactagtggttacagagcaataatgggcccaaaatatgtcaagtacgttggctttcttcaaattgccagttgaagttccagtcttgtgatcattaccgaagcatataccttcaagcgttggtcagtctaggtttagacttgcagcaagggatctgttgctagacgatcatttctcttccaggcagggaactacaactataccccgcaatctaagcccttgagcagagttcattgttaaacaaattgaattggtatacgctgatatatgaacctcagaactcccacaaatcccgcatgaaacaccctggaccagagtccacaccaccatcttcctctagtagacgatctgtgaagatacgcttgggaatcatatactcgacgacaggaatcttcttgagatttctctcttccactccaaggtctgcagtcaccatgcccgcgtacgtgtgatcaaggaaatcctccagactgtatgattgctttgtgaactgctcggaaatgatccgtgcaatggccgcaacgttggggtggaagtgagattggagcgtctcgatctcccaaagactgctctcaatggcgttggtcatgttggggtcgggctcgtttggatcgaacggatcgtccatgccttctttttccacctccgcaaggagatccttatcccgaatagatcggtgcatcatgaatgtggtcgtggggtgttccttgaaaaagttgtacatgaacggaacaatcaccacaatggcggagggaggggcattcaatgcaagacgagcgagacgcttgatgaagctggcgactaatgtggacggaagatgggttgaggacaagaaggtgttcagcagtcggaagaatcgtgatctgtgcttcgagtgcagcagctcggaatcgaggagagagtacagcttggcgtagaattgagggtagtccaggttcttttcctggatcaggtagaagagaccggaaagtgcgaggagggatgtcgcaccaccgacattgtatgagtcggtcaagaagtccatcagcagttccggtcggttgaaccaaggttcgatgttatgcaccatcatacgtaggaggtttttgcgctgcgattgcgagaggttgtttcgtagaatggccagccatgcctcctgcgcctgcttcctgtgggagtttgccgaaactaggcgcttattcttggtatctcgtttcgcgtagaagttttcgaacttgtgttccggtccaggaacctcgtcgcaggcctgaaggatcttaatcaggatttcaaggacttcgggggatcgtttcgtagaggcataatcactgatacaagttagcccaagactcgactgcgaagaatatatacatacgccatctgtgtgaaagtgtgatatctcacatcctcgtactccttcacaaacttggtgatggcttcggactgcagatcctggccgttgtgggcctcaatgatggccgcaaagatatctttgaagaaacccgtcgaccaaacattattctcagcacctgggatatgggcgagacgttccttgacaatgcgcatgctcagtgccagagcagcaatctagatcatcagtaatagtaaccccgccagatcagagcacacatacctgggaggaagcatctgcctcgcgcataatagccacaagagcattctgataatcaaggcaacgctccttcaaccatgccacaactattttctcgttctcggccgcacggctcgactcggtcaaatttcctccggcgatcaatcgactgaacacacggcaaagagagacggccacagccatctctggtttctcggcgttgttctcgacattgagcatggagagaagggtcgcaatattgttgtagccctttcgcgactccgcaatttgattctctagctcttgaatagtagacagtttctcggcgaaattgtcctcggcgacagcgcggcgcttggaggatgggccgctggcatttttgccgctcttgcgctttttagagctcgaatccgtaacaagtgcaggcattttgggcaggcgtcttgtaatgccgtgaatagtttatctgcaacttttttttatcgttcagaccatctcggatgctggtttttccgaggaacggaactatcgcccgaaacggctagcgtcttcacctcctagccatcccgaacctcaagtctcctcaattccgttcacccaccccatagaccaagattcttccatctgcaacaatggcttcgcgtcttgctaagagcgccattggtacgctttttacgaacctcgaccgtctgatcgactcaatgccttcagttactaacgcaccctaggcgcatcccgacttcggccggctctttccgtccgtggtgtccctgccgtcactgccaacctgacctcctctcgtcaggcctccaacgttcccgccgaggagcccgcgaagaaggcgcagtctattctgaatgccatccccggcaactccctgatcagcaagaccgccaccttgtctgccgtcgccggtctgtccatcgccgccatcagcaacgagctgtacgtcatgaacgaggagaccgtcgctgctttctgtttgctttctgtcttcaccgcagtcggcaagtacggtggtcccgcttaccgcgagtgggccgagggtcaggtccagaagcacaaggacatcctgaacgctgcccgtgccgaccacaccaacgctgttcagcagcgtattgacaacgtcgcccagatgtctggcgttgtcgaggttaccaagcagctgttcgctgtttccaaggtagggatactcggtcacgtatgttgatacttgggtcggtgttgacaatccgtttcaggaaaccgcccagctcgaggccaaggcctacgagctcgagcagcgcactgccctcgctgatgaggccaagtcggtcctcgagtcgtgggtgcgttacgagaaccaggtcaagcagcgccagcagcaggagcttgcccagtccgttattgccaagatccacaaggagcttgagaaccccaaggttctccagcagatcctccagcagagcgttgctgatgttgagcgtgagtaatccactaccgactttaaggaggagtgctaactattctcaggcatcatggcgtccaaggccctgtaaatgggctcactgcattcggcattgtgtacaaaactataagggctatttgcatgccgagttagaccttgcaataccattttgattctttctatattcggacacgtgcttcaagacatgttatgaagcgagtggggcttgaaatgcccagctgatgcccagcatatgaatctgttttggcctttcatcgtagaacaccttgaccagaatatgaaatcagtgcccttttaatgtatgtgactagtaccacttcagagtctacgtagtatatacttgcaagcaaacactggccatttatttaccgaggcaaggctgagtccatgcgcccaaggtggctctatgcaggtctaatgcagcgccaccaccggggccgtggagaatgcgataagagatctatactacgatttcgtatagttggaaaattcgcaaatatcgctaggacatctaagtatttcaagtatctaatattccataattccattgtgtgcacacgggatattagccgctggccaagaccccggcccccgtcaccagcccgtgtaagccggcatacacagccactgttcattcattgtggttatttttcatatcattcatcctcagtcctacaagtattcctgtaaatacttctctcccacctgaccccacacaagaagacccaagtccactcccggcgccatccgacaagtagatgcgccatgccctcactacgtaacatcctccacaaacacgacgatctcagcaccacccaaacacctcgaaatgcaccagcaaacccagcccctgagttgaagctcatccgtacagacacccatacccaagagataatcgtacctccatcgtacccagacgacccaaccccatacccatcctcaccatctcaagaggagcccacatctccacgccggagcttccagttctttaaccgctcccccagacggccctctgtttcctcgcagtcccctccccatcgcgagcgccacctctcaagcttcctacatcaccatcgcagtcgcagtaactcgcgtgactcgtccgctaatatccccgcggacctaccgcagatcgaggaggatcgcggcgcgagtaagcaggagcgcgaggcgctgtgggagaagagggctactgtgcttgtgcagcacaacccgcagtttgcgcactccggttcgtctttgccggtgcggcagggcgagggagaagcttcgctgggtttagggttggggcaaggggggcaggttgggtcgaggagctcaagtcagagtcgggttggtgtggatccaaatcaggatgtaggtggtgttgcttatatatttgcgtgatggttgtcgttgtcgttggaatgtggggctgacgaattatagattaatattcaagaggcgatccgactgcacgaatctggtggtgagttttgctttaatctgcagttggggatatacattaacattgaatatagatctcgagcgatcaactcacatgttcgaacaacttgctgatccaaatggcgcaaataatcctctgagtcaggttctttatggcctcgcgctacggtaatcacgccccctatttctcaattcatagatgctaatgtgtctagacacggatggggctgtcctgtagatgcaacacgcgccgtgacctatctctccgccgcagcatccaattccgccgcggttgaggcggaggctctgcgtgccggagttaagaaagggggagttgcgaaaggcgagctcgttttggctatcttcgaactggccaattgcttccgccaggggtggggtatagcgaaggatcctgctgctgctagacagtattacgagaccgctgcaaatttgggtgacactgatgcaatgaacgaagcgggatggtgttatctcgagggatttggggggaagaaagacaaggtatgtgtgatttccacttagatatgtattctgtgtgtgcctattctgactcgatgtggctatagttcaaagcggctaagtattaccgacttgccgaggagaatgggtgccctactcttgggaattcatggtatgtgcaactgactgcgatatggagtttgaatctaatggatactataggatctggaaagacaagtacaacccgaagtaatccgctacaacaaaggtagctatcattagctctttactacgacggaggtgattattatcacctctatctacgattcatgtgctttacggtcttattgcttgatgtatctttaacttctacgtgtcacgtcaaacattcatggtcgatgtccaaattgaacataatctaaaaccatcacgatgtccatagtcacgggtggatctgtccgcgggaactaagcctgatttgggctagtctgctccatagaaggggaacctcagctcctttcttcaacttacacatatcccatctacttcttgatcttctatatggaagctgagacatcttttagtgcatttctcgaaacatgtgctgacggaggtctctaagcacctaagaacccatctttagtagtggattaactactgagaacctagctaaatcaaaacgtatctcctgaggtgcagaatctttgaaccgagttcagaatgtttcggcacgaggagtgcaacaattcctcttctagtctcagcatgatggttacgcagcttgcagccgccttcctctcatcctagtgaaaggagtcatctccaaatacacgcatacttccagtatgttccatcttgctcattctttactttactgaaagtactgattatctcttagacagattgatgcactaaggtattgtaagtaagtaatttgtcatgtctctctttgcccctctgcagcctttgttcttttgtcccacaaagctatatagttggcttcatggccgggatagcacttatcacgaacgatgagcggtctcgcatattgagcaacctttcattatatattgatatcctatatatacctaggcaaccaggcaaatatcatatatccttagagtcattgaagaatgctccaggaaatcgtcaggaagagggagtaccctatcaggtgtgactatctgaaggtttgttagatcttctcttcctagtttctagaagagctaagcgagctggtcacgagtttgcagggtttgcgtggaaacgtataaaaccctgcaaacagttcctcctttctctttcctttccttctctcttcttatacttactgttctgattgaactggcatgtaacatcaaccgacttcacggcagagcataccttgcacttgctggtgatattacagattatcgtggatgtccccggataggacatgatttcgaggccaagatggcctatcatggtcctgggttattctttccatcgatatcacatattgagctccgtcaaatctcggttcaccattatcctacctttgtcgaacaacctctgcacgttgatcattccagtttcactttgctctcaccaaccagttaagtcaggctctagtacgcgctacttttggctgtatactgactatccgatcatctctaggacctctatatagccaaccaaatcggcatcgcgagctcgtccatgtgggtgacgagcagtgactttgggcctcttccaacaatcagatggggcagcttacaagtcatgtttacattatacccgagcctggaagcgtggtgcttcgacctgtcttatctaagacaatggctgcagcaagaaggttttaccgatgcccggaattgagaatgtctgcttgctcctccaagagttccgcaccaacgtgagaagggtgattggtaagggtggtcagaaacaaaagttgacgcacacagccccgaatgtgccagaaatgagaatgccagctgtttcgcagccaactcagaccaccttggagtccaccgagtctgttgcgaccgagcaggtgtctacacaagcagtcatgagtgagccaactgtttctcagccaactcagactgttctggagtacacccagactgtctcaaccgagcaggtgcccaccgagacagctatgagtgtgtcagctgttcccgaggagttttatcacgatacggacgaacatcaataaaccaatctcctcgtcgaaacgaagaggtccagagcgcatgagcccggccatgcaagaattcgcagaggtggttgcatggctgaagagtgatctcgccaaccacactagtaggagtgccatttccttaactagaggctggcaagtgctaacattataatgtataggcgccgttttgttattccgtgcggcctccagccatcttacatctcctatttgaaatagccgcaaatgctatcagtttggcatcgttgcaacctgcttcacatcggtgctgctattgttattctatcagcgcggctttggcgtaccatgtgtggaagaggaacctgacgaacctaaatattccgatgagccagctaggctctgagctgagcagtcatttctgattacgatcaggggccccaaattatacctgtgatagttcgttgctccaaaccgtgcgataccttctccattcactctttatctttcaccatgggaggcttcatgatacctgcctacacttgctgttcgctttcagaatccaactatcagtgcttggcatgtataagatcgggtatattggttgggctgcatcggtattcgcacgctcgtccctggcatggtgagtttttcgatattcatgctctggtactattttctcacatgctcatagggtaaatgccggccgtgtctcttcgtgtcccaggatatggcacttcctcgcctactggtgctataaggactgattcctatgcactaggcgatacggcacccaacatgcatcctgggaccgttcagttgactattccccttaaatctagcttagagatacagcttcctaagtctaagatttacccagttggtcctagggaccgtgaggttattaacgccgcctttcaaccgttacatgaccaaggaaagatgagctatataacgggacatactactacgggtttccctgtctttattatatagtatacgactcaccggcccaggcgcgaacccgcgtttaagtttttctaccaatggtacgtccgacgcgaacatcgcggccggatatgcgtcgtttcgcatcggggccaggaaatgttcatatcgctatcatgggtttctgcaatagcgtaccctacgttcagcggcaaatggacctactcttgaaagagtttgtggagttctgccgtgcgtacctcgaaaatcgggattggggcaagaaaggaggtgttcgagaaactcctgtcattttggggaaggattaagccctactattgattcgttttttggagggaaaggtgaaggaagcgatgctattcaaaaacgttgaaaagacctcctgtaggcacaagacattccgaatacaaaatagataacactgtcgaaagcatagtttcgaatttagaataaatcaaccatatagaaccagcctgcttagtttttgagcatagtcacgtacaagatgcgccaatatagaagccaactttgcttcactagctcagtgtcttgactacaccggtattcttctcattggagaagtaatcgagccgggccagatcctaccggactctcgggcatctgcttctctgctcagcctgtgcatgcatacggtcggcatttcatccaattaccgggcagactcggcagcctactgatagtggcggtgaattgcaggcccgcatctccccaggttggccatgcatgaagcatattcagactatatcctaatctcaagccagtgatagacccgctagtctcattcctgctagtacccgctttccggggtcaaattgctctgacggttttaagcttggaacgaaccagaacaatgattgtttgaaacgaaggttgatttactacagctagagattcaactgacccgaggattaggatgtgcggaatagttaatggagatgaggatagtctgttatactaggatctctgtgcgtcaagctgtccatgcaggatcgatcaaaaccaagtttctatcctcgagcaagccatcgaggagataatatgccgatgcagctgtgatatgaatatctaatattagccaaacactttagactcctatagaacggtgtatatttcctatcttggacgctaagaccgggaccatgatgttccggtcacatttgaccaaacaagtcaagtcgaccatatcaatgtctgttgcttacggagcacacgctgtcttattttgtcatgcaaatgttgtccatctcctcaattcaaaagcctccgcggtaataataacatcaatatcacgaccccagccccagccccttagacccaccacagtatatcccttcccatctcggccgcccacgcaagctcaatgtgtcaccgccaagccaacaaacaacataaacctcagcggctgcaccaccccttacaagtgcaatgcgaagtataatgcgaagcggctggtgacattgccagccgcttactagcagctctattcaagtcacatcggggcccagattcttgtgtctgtcctaacgagtcaagttgcacaggtctgcttgatctcactatcaatgacctcactcagtgtagccttgtggatatttgtctacattaatataacaggaggcaaaacagcccctccgggtcatcttaaatcttaactagtagaacatcatcggagtatagtagctactcggaggctacgtcgcgagcaatccgaatgacaagactctccagccctcatccatccaatcagtgcagatcaatcccacagctacccctgtagatcccccaatggccctgtttcaggcgagaacatgatagatcttcgcgctggtgcgtggcttgtgtcattggtactccacgcccgagccaactaaccaggtataagacattgacggcgcctgattgatatacattcgacttaattttgctttcgttgtgatattaaatacccattcaatcttcaatcttcactttcatttttacttttaacttttagcttgagtacttactgctattctcacgtatgttcgttctgtcttatcttacaccgtttcttgcccttgcgtccgtctaaagcatactgttctattattatactcggctcggtcgctaatttatttgatcttgtcttactccagatccatttctgaatcttccaacttcacaatacgaaatgcgcgcttcagttatcatcctcggcttcctcgctactcttaccgtcgcgctgcctgaagcataccccaaggctgcgatcgcgtgtcaatcggtgagtcttcaatagcaatatggcaaatacagacaattcctaatgttattaggataccatggtctgcatagctgcgaactgtgccgctgagggatgttgctgtgagggacttacgtgcggatctaatggggtaagtacatagctaccgagcttgatggattatcgagcgtgatttgttgattcaatgctaatgaatgatagacttgcacgccactataagatgttttggagttacaatctgataaagggatgggcgcaaccacgcctttttgagttggcatgagaatgcgactgtgctcaatgctctcacttgtatttatctatttgttaatagtatataattcgaatcaaagattctcaatcctcattgctagtcccatataacataaaacaggagtggtagctttagtcgatgcatctatcgtcctcatggctcagacttagaatggcacatcactcgtgaagattcaaacgaaaccaacaaaccctcggcaaacattccacagacgagagccccatcttcgaccatatctcaaacccaatccccacagcaagtaatccaagccccactcaattcatttcaactccccagcctcaagccggcgttgcacacggcgccagggccgagtctcatcatcatctcgtttccttttcgtctgatcttcattggcactcagctgtctgcctctaacaagaaacccaaccgaagcgcccactatcacaaccgccaaaagtaggatgataatagcggctgcggctggtagcagaaagtagtagaatagcttgataccaccgatgacgaggatcatggttacccatattgggcgcaggaggatgggccattcgttgaaggctgagccgaagaggtcttcgcctatttgttccattttggtatatggtgagatagtgaaggcggtttgatttttttggtttggatttggttgtctcgttcgagatagaaaggagaggagtatggtaacagctcagcatggagaaagatgaagtctttagtcgacgcctgaacttgtcgttgtcgttgtcgtccgttcaaggctggaaagaacccggtccaggaaagtcaggacccagatggccgctttcctattcgggaagtatagctttttcactacctaaccagaaccagaaccaggtacgtaggtgttactctgcaccacatccgcagaattatctcccaaatgcatttccttcaaagcatccaacctcctcctcctagcaagaaccatctcggcaagaagctcaatctcgatctcgagacgcttttctaggtcgatggtatcaccggggatattcccagctaccgggggagcagtaatttgttccgcatctgactccctctgttcccgctccttcttctccttctccttctccttttctcgcttcgctttactctcctcagagttcatatcccatccaaatagtgcggcgagtatagcgaagaggaggaaggcgagaatgaagattatggctattgccacggttaccgggatgaggaagtagattaatgttttgaagaatccgctgatgatggatgttgttattaggagcgggcgcatgtagaagggttcgcattcgaatgggaattggcatggcatggtggatttgggttgttttggtttttgttcggcacggaaggaagagtggtagtaagtttgttctgagggtttgtggtaaatggatgatatttctcatatcctcttctgacttggtttgggctgtatgatatgcactgccccaattgtcgggcgcggttgcatgatgtcagtgcacgacgtgttgcatgacaagccgaggtctgaatggaggaaagggtggcagggcagatgaagacaaggatatcaagtgttgagatcgacagaaatacactacatatttcctacactacagaattaccagatcaaaactcgtaagaaggcataaatgcaatatacacaggactaataacaataaacagcaaagagatcaggtgcaaggtcagtagacaacgtcaaataaaagatgtatctaccagagtcaagtttaaaataaaatccaagaaaggaagaaagggccgatcgtcgtccgtagacacaccaagccgagaaagggaaaactcctagtcctcctgtacaagttcgtgtgaactaaaacaaaattcaaaaatccatcagagacatggcgcttagaagacggaagagcaaccccagtgctgctcaacgttgaactcgccggggctcttccaggtgtcgtcagagaaggagaagaagatggacttggagccgacgctggcggcgatggacttgatggcagtggcctgctcagagacaccggggacggcggcgccgttggagtcaccggcgttgggccagccggtctcgaggttgatgacgtcctttccaccgcagatctcctcgagctcctcgaactcgctcttggtgaactcaccggcctgggcggcggtgacatcggcgttgaagaaggggtggatgttggcaccgacgatgtcgacggcgctgcagagagtggcagagccgtactgctgccagacgttgatgggctcggtggtggtgaccagaccggtgtagccggcggccttgaagctagcggcggaggactcgatgaaggaggccagggtggcagcgtcgacgtatccggactggatggcctcgttaccgacaacgatcagctcgaccatggaccactcggcccaggcgatgatctcggtgacctgctccttggcggcggagacaccggagccgtcaatgtagacacccatgatgatgttgatgccgagggacttgcaggcctcgccgatgtactccagaccgctgcagtcagtggagtagacacggaccaggttgaagcccttgctcttgatggtggtgaggtcggagagaacggcggccttggtcttgcagtcaccagcggcggtgtagggggagtaagtcataccgtactggccctcaccgaggacggtggggacaccagtggccttggcggtggaggaggaggaggcagagctggaggtggagctggaggagctgacaacggaagcagtgctggtgctgacgggaacaacaggagcgacagtgctggtgctgacgacggggacggcagtggtagcggcagcggcagtggtaggcacaacggcggcggtggtcgaggccagggtgttggtggcagcagggcagatgtaggtgtaatcagtgcgggtcacggtgacggtggtctcatcctgagtgtaggtaccggggacaatggtctggggggtagggtagaccagaacggtgctggtaggcacagaggtggtggtagggggcacaatggtgtaggtaccagccgaggggcagatgtaggtggtggtctcaatcacgctggtcacggtgctgccggagggcttgacggtggcataggggcaggtgactgtagtggcagtctcgacaatggtggtaacaccaccgtaggtgacggtaccgctggggacctcagtggaggtggcaccgcagacggtggtggtgtcccagacggtgatggtggtggccgggatggtgtagacaccagtggtggagaaggtgctcacaccgggagtgggcagcacaacggcaggggtgctagcgacgctggaggtagcgaaggtgctaacagctggcaccgaggacgaagcagactctgcgccaacaccagagacggtgacggtcaaagtgctggtgctggtggattgcacagtgctggtgtgagtgctggtctcggggatagcgatgggagtagaggaggaagagggaatagcaacagtctcagcagggaccgaggaagtagcgggaacagcctcgacgggaacagaggtcgatgtagcgggaacaacagactcgtcgaccagggtagcggagccgtagacggtgataaccttggtggtgcaaccacaggtctgctcggcctcagcaggggcagaggaccaggcgctgacagcagcctcgcgacgctggtggaaagcatcatggcgacggtgaacgccatcggccatggcagagccgaccaaggcggcggcgaaaatagctcccttcattatggatggataatacagccacgcaaaaagaatgaatgcccgctgaacgagtgaagcggtggtcaatagaatcgaaacgtggatgagaaggtgaaaagagagtgatgggggggcaagcaaggccttttgatggagaaatggttaccgggggagagttagggggaagggaaaaggagaaagaatacagaggtatacacgcagatacacgcacatacacacgtacagctccaccgatcgtgaattggcaatttaatttcctcgaattacccctggccgagtctagatgtgattagattgaggtgattggtttgtttaggtattggtataacatacatctaacttacatatgcaggtactataaacagtcagatcgttatattctcgcccaacggttacaacatatccagtgtctatgtttatgtctattctatgtctattctatgtctctaactattctatattctacgtcccgtattcgtattactattattatccagcacggatcatacatcgccctccccttttcatctaagccttcggccccagcgtcgaaaacagtgtctcacacccagaatagtcttctccttaccgctgtgagggtccaacttcctttggccacattataccgggtttcatatatctgcccgatcatgcaaggccttgtaccctgtggctttatcttgctggcaagcccgagccctccacgatccaagaattagggcatctggaattctcaattggcagattaaaaccccaaacccaaagaaaacagaaaagtctcttcccgcgccatgtggggccaactgtcatagcgtccccggccagtcccagaaaggaaaggtggcagctaaattggggtcggtgctggaccctgattggctgtggtactacatctaatttccgccctgccgatctttaccaccaaaaccaccgtaccggtattattaatcttacgattaccggccagatacagtgtatattattgctttttcctaattcggactccgttgtctcggattacacggagtcgacgaagattctcgaatgtcttatactctccatacctatactaatacaactactcatcctcatcctcttggaaaacacatgcgctgtaattgcgctggcccccctgtcgatctccaacgatatacacactcatgaacaggccgatcacccggtctaaccaaagtcaaaaacagatgataaacggggcaggaagcttgaattgctctattaatgagtcgcgccgaataggaaggaccggtcaacgagccaccttctattcagagcatagcccttgtctagtgggatcgtggaatcaagaaataacactgtagcctgatccgaggcaaccgatatcttaggatgtacgcgtacaatcaagcagtaggcatgttgtagctatatgttgtatagcgacaatcctaccatccctgtactgagtgttgaccacaaggaggacgaggttggatcctcgatctcttcgactggcgatcacgactcggggtagatcacacggatggggacaaagggtgtcggagattaccgtattctatagatacgtagcgtgactgatttaattgcactcactaaatagtctgatctatctatgttgtagctgatttatggatgttactattgactcaagagttgggcaactagaatgatgttaaccctgtattgtatcgcctctgccacgtttagtccatacacaaaacaacaaaacaactcaagccaactcaacgatccagaccgccagaatcttggccaactgacaattccaatgataaatgaaggccaagataatagcggatctgggcgtgggcaatttactttaggtcaaggcttggcaataccctggttgaggttattcagggggcttccaggggtcggcgtgcggccgaggactgcgattcgtgcagagactggggtggcggttctcgactccgttcagccttgttattggttttctgtttctgtttcatatagaacgttccaaggtctagagtaacggtgtgggtttatgttccggggaagtttctgctttttggttttccctgcatatgacttgtttcttttgggacgtgtcggattagggctatttattttacgctggcattccggatgttctatacaggccacatgggatggcgtttggaatgtgtcgctttatctttatttctaggtcatttcattatctgatgtggtttctatcaacggcttaatcccgagttcagaatatatttgtttgcactttgaagtaattgacatattccgtatgccttgcaggatatatatctcagaacatcaagaaatgacaccatgatcagggtccacagggtccaatatccttgccagaataaaccataggcaacctgaatgtatttgactcaaactcaggctctttcgggccttccagtcacttttgtccgtctctcgtacgagaagcgaaggagggggaggaagataatcgtgtttctgttctacattctttcttagacaagtgtcgcttgtatctagattgcctatcacctacctcatctttgagatgtacgtcgacttcgtatggacaatttgcatggaataatagacgtcgaggtacaggggtcgatagaagaatgacatattagaaagtggctagatttgggagaggagtttggggaatataataaactgacgtcttcaagggctaacctgctaagatgttctcaaccattcattgtacttgtgggcagtgtgtctgagcgatgtgctacatattgattcgtagcgtggaaggttgtctcggtcgtagagaagcccgaaggggtaggatgcatagatgcatagaggaatcaacggcgatagtaaagaagatagaacattgtgtgcatagcgttgtcatatgctaggaatatacggagtagagtgagtgctctaaatatgtatctggtgtactcggtaggtcccgaagtgaacctggatgtacatcacaacaacagtacatccaaaataaagagataagactgtcacacaaaacgaaaagtaacacaatgcaagacgtagatatctgagtcttgttaaatcagagcaaagatagaaaaggcagaacttgtcgctgccgaatctgaccatcaccgtgccacccgatcatgccacacaccgtaccacctcaccaccaccatcatcaccaccaccaccatcaccagtatcttccaatcatccgacctcgaataataatcggcagttcactctccacaaatcctaattttaaccccagaaacaggaacggagaaacccgcctaatacatcgcaccacatccgacgtcacgactcccaaccaaccacagccagggttatcccggataaactcactcccagggaaaggtcacgctatacagaacatgccccaggaacggcgaacggccagtcccgccatccagcctctcggaaccgtgacggtttgatgctgtcaggccacttgctgtggctttgcatgatgagatgggagaggtggcaggatgtatataaggctggatgttacacgagtttacctattcttcatcacacaagacattccattcatacattacctacttcggttaccttgatacttgatacttgacttctatacatctatctacatctacatccatctacaacagccaccatgcaaccaaccgaccaaaccaagacaaaggccaagacagccgctgccaaagccaaagccgctgaaagcgagcacgcccgtctgcagaatgactacggcgcagactactgggtccgcaatggccaagagcatcgagtatgtacaccactaccaccgccactaccaattccgatccattgctaacatccaaaagcgtgctactggtggacgaggcctcttcgccggtctacaagacgtgaagcactacaacgtcgaccacggctgggctcgtcgcaagtctgagactgagcagcctgggattctggggtctatttggagtcggtatgttttacttcttgtctatatttgggtttgggttggggttagtgctgactttattgataggatcactggactttgatttggactcgctttgctggttccgtttgattcgattctagactttgtcttttctgacatagactaaaaggggattgggttaagattgagatgattgatgtttgcttttggagttggattttttgattctgtttgtttgagcattgttttgttttatactatatctttcttgatataggagttctggtggaagagctggtttctttaatttctttttgatatgtttatgctcttatacatatcgtgtttggatatatttaatatatcctatagacaatgacatgcaataagcttattcgatataatggttccttctggtctatgtaagcgagtaagcagaaatgcaatcaattgtacattagtaaatatacactcgagatcaacagtcaatactctagaaataccataacggtctacatccatgatcacaggaaaacgtaatattccaagtactatatatatacataaccgctaatagatataccaaacgccctcctagcgtctcaattttagaaatgaggtatcaacacaaccaatctactcccaagagtcaatcttcatggtacccttctcctgcagattcttgtgcatgttgaaagcctggaagagcatatgaggctcatgacccatacccttacgcagacactcgaactccgcacggtcaaggtaatccgtcaggataggagtgtagtcagggtgcgagcagtgcttgatgataacacgggcacgctcacgaggagacaaaccacgaacatcagcaagaccctgctcggtcacgataacgtcaagatcgtgctcggtctggtcgatgtgcgtggcgaacggaacgatacagctgacaccggtgggatcggtcttggtgggacgcgcggacggggtgtgcatgatactgtacttggagttgcgcaggaaatcggcggagccgccgaggccgttgagcatgcgcgagcccatcacgcaggtgctgttggcgtgcgcgtagatgtcgacttcgacgggcgtgttcatgccgatgcagccgagacgacggatgatctcgggggagttggagacttgctgcgagcgcaggaggatcttgggcgcgtagcggtcccagttggcgtagaagcgcttgaagccgtcgggggacaggcggatggaggtcgcggtggcgaagtcgaggttgccgctatcgaagaggtcgaggaaggcatcttgcaggacttcggtccacacggttaggttcttgaagtcagcgccgcccttgctgagaccgcctacgacggcgttggcgatgttgccgatgccggactggatggggagcaggttggttgggagacggccgtgcttgacctcatgctggaggaactcgatcaggttcgaggcgatggcttgcgagccttcgtcttcgggggagttgtgcgtggtcttgtcggcatagtcggactcgacgatggccacaaccttctccgggtcgacggggatgtaggttgttccgatgcggtcgtcgggacgggtgacgaggtagggcttgcggaagggggggaggtcggtgccggtgatatcgtgcagaccctcgaaggagggcatggcggtgttgacctcgatgatgaccttctcggccatctggatcagctcgggagaagcaccgacggaagcaccggggatgatgccaccgtcctcggtgatggcagtagcctcaatgatagccacgtcgatagtgggcttgggcttgttcaaagtgtaccaaccctgggaaattgttagcggtgaatatttttctccggtaacgcaaaactcacatagaccaaatccgaagggaacatgctcagatgcttatcgaagaacttgatgtggccggtgttgattcccttggcgatttcctttccaacctggtgagggctgcggcgctcaatcatgttcaagtgcgcccaacggctctcggtgtctgcgccggcggaggcaccgacaaacaggttgtacttcagctttccctcgaggctgttcgtctggacgtgatcggccagcgcattggggatcatcctggatcgggttagcgttgccctcgcttactatagtatcgtcgcggtacatacttgggataaccgacaccggtgaatccggaccaaccaatgtacgtgccattggggaagtggtgaatcagatcctcggctttggcgagcttcttcagatacgatgggcgccgtacacggctcttcaacaaggccgaagcagacatgatgtaggaggggagagtgtcaaaaatgttggaaggaagaggaagaaaggggatctcggggtataagtaatttcgttaaccccacgggcagaggtctccacacaggaatgcaaggccgatagctccgggagaatggatgttttaaaaatttagtcttggactggctatatgtatggactcgggatattagacatggatattggacattgaatactgcatagcttattagtatttaagcaccggcatccaatcgttatatatccttcttcttctattaaatttgccttggaatcgtttaatttgcaattcttcgcattcgactaaatcagagtgacgtcacgtccctcattcggctttggttcggccggtcatcgttcggcttttactaagcggcttctctgctgttcccctgcatatggagtacggagatctataattaagagagagctctttcagacgacatgctatccttccaatatattcaacataaacacacacacacacacccccatacacaacagaaaaatcatatctcggaacagataccccgaacttcccccgatccaccctcgggacagaatcggttatgcgggctcggccacacggagatttcagattgcataacctccgtaatggctcatgcatttcacaccattcggcatatatagccgctagcgatgccgattattccgatttagtaacagaagccgatgatctggaggaatggccctttttcataccccggaagttcgacggaatcccgcattagggcatggcgcacattggggaatgtgcgatatcgtacgacgcgattcttattttgttcgagctttggcgttttgtgaggctacggctcggagtacggggactccgtaactataagctcggctagctgttagcctaatgcgggatagttcgacgttgttaaccacacggttaactatttacaatataaaattgattaaggggaagaccttccctttattgcttgatgcctaattacttagccgacggttcttatatcggcatctgttggattaccctttatggtgaaaccgagatatgatagaattagtgataaatcctcattaatacatatcagaataaagccaatctctccatggccattatttcatttgtgagaataaagtaagagatacttgaagagaaaatagagatacaaatacaaactacggaaacccgtgcaaaaaaagaaaaacattcgtcgcaatttcctcatcgtgtacgccatcctcccctcccacaatcaacaataatgcatgccaatccccccgcttcgcaaggggactgacccgtcgtaaaagttaccaacgcaacaccgtctacgcctctgtaggctcggcatccgtcatctcaacatccgccgccttctcctccgcattagcgggggccgcggagccggcgccagacccagacgcagatccctcacgggccgcgggactaccagagagggtcccgtcgacccaagagcggaaccgctggttgctctcgtctacctggtccttgctgaggccgcgggcccaggccgggttgttcacgaacttctccacgaagcggtcatggcgcttttcgtgaagcgcggccttctccttggcgagttcgtcggcctgggccttgatggcctcagcgtcggcatccttttccgggatgggcgcgttggagcgccagaaccagtcgtaggtgggcggctggtacagcatcgtgtagttgttggcacagatgcggatggtcaagccgtcgtggtgctgcaggctgcggtagtaccgctcgtactcctcatcttcctcgagcttcggaggaaggttgcgcttcagcaggggcatgcgcatcttcgagaactgcacgccttcggtggggtcgcgcatcgagtaggcggtcacatagtaggaccagcgctcttctggagtgagctcctcgttgtcaagggttgcgtcttcgctggtcatcacttggacggtgacacggcggtcggcggggtactgggattggttagttatgtcagggcatctttgaaattagaactcacgaaagtaatgcgatagatatctccatccttgaccagtcgctccacttgtttacggtattggatctcctggtggtgggtagtctcctccttctcccgttccttgaagaaaagattgataatatcggagctgcgatcgcgagagtcgccggtgaagatagatgccacaaacttggaaatcgaggagaagatacgttccaggttgtagagcaggtatccgctctggatgtagaagcgacgtagggtctcttcgaggtgaacctgatcgatatcgcccttaataacctcctcgcacatgcgcacgatctgcttgtaaaggttggctttgggatcgacatcatagaagaaatcactagggtatcgatcgatcaagcacaagtcatgggcagccttaggcagaacaccgcgtcggacttgttcgcgggccgtgtcctcttgctccttgatgcgcaggagacgcgagtaaaggatctcaaaagtacgcaagaagcagaagatgttcaggttgcagtacatatggtgctccttcttcttgtacttctcgttcagtgtgtattcatgctcaaggttgaagttgccctttccgggatgctccatccaccgcagttcagccacgtcaaatgattcctcggaatcggagacggtggatggaacctgggcagcaggttcgtcatggttgttcacaccatcctctttaggcttctcggtctggcgtccgcgttcaagggcatcgcgcagaagatccagcttctgcaggtccacccccttgcggctcccattggacgcatcgtcattggcataagtatcatcgtcctcattgatggcgtggtagacttcgtccatgtacaagttgaaagtgtaacggtccaggccgaagaaagtaggaatgaaatcccggataaagttcatgagccgctgaggatcagcgccaaagccattggtgttgcggtcaaagtacaagaaaagcaagtacacagaatccagaaggacctgagtatcgctgaacttatactcagcctggaacttgggtgggacgcggccactcttgcgactagcctgtccatcctcaaacttagtctgtatgtcttgctggatgttcttggcgacgaagagcttcttgtcggtttgcttggtggcgatggcttggtggtcaagactgcgccagtatgctcgctgcatctgttcgcgccagaccttgtcccactcgcgctggcatgccttccattcctcgagcttctgcttcaagcggtaaagaacaataggaaggacgtggcatggacggaggaacatgtctcggatgactttctcgccgcgttgacggtcgtaaatcttcttgatgacacgctggtaaattgcctcgctttggccaccgagaccttgtggcaatttgaaggacatgcgttccgcatcattcatgtaaaggaattgctggcaaatgggctcaatcagctggatggtgcgggtgcaagcctcgatgtggtgatcgtagtcgtggcgatcttcctcaatgcgatgcaaagcatcttcatactggttcttgcggtgcgcaacaaagccagaatcttccgaagcccaggtgggatgtgaggcccagtcatcattaagaacaccgttgcaaagcggatcgcgtccactgcagggcttttggcgttcacgcttaggaaggagtcggtaactcggtcccagagaccggcagtgagccaggttgacgatacctgtttccgggttcgccttggggtcgatgattttatcctcagcctcttcggcactcatgaaacgtctgaaccagttcatgagctcagcattggacccgatgtatccctctgctctcttgaccaggatgtgacgatcgaggagatccgtggtgtacaggttgcaaagcttgaggaagtcgctgaacacttgcttgttcgcgatgaacttctttacgcggtcaaagaacgcgatttcttcctggctgggagtcatggagaccgagggaggaagaggctctgggagagcaggaatcaaagtgggagagacatttgccatgtcgacagagggctttccatggtgatactttggtctcttgctggcgttgccgaactgcgaattctgacctcggttggcctcagacaagcgagcagcttcggcaccggcaggccccgagatagagccaacaccacctgggccaccacgacgcttcttgctctccttggggtcctttacattaaactggcccaaaggaggcatcttgacgtcacggttaggagtctgggaggtgaaacctgcaggttcaccgcggaggttgctaagaggagcttgttcttcggcttggcgctgcgcagctacttgtttggcatgcgcggcagattccggcaagaactgtttgaagtcctccaaaagatccggagcagtgttgaacaactgagtaacctgtccatagacatcctggataggttttgactcccgctggtaagtctgaagtatctcgaggaactgcttgtagatctccggcgcacttgaaaagcggttcttgatcttgttcacgtagctgatggcgtggttgaactccacgggaccacgcttgttcagatcctgagcaccctggagcataccagttccgacgccagccaggttgttcatcggctgggtgagagagttctgtccagaacccatgagggacgacctaccaagtccagcagacgctgcggaggcagcgccttgcagctgtgccactccacggtggtcttgctgatgagtcatggcggaagcagcttgctgctcctgttgggtagggtagccatagtggtgctcctgagcggggcccggtccatcctgctggtacatgccgcccatcatcctcgagccaggagagtaggaaccagatgtggggccctgctgatcctgctgctggccttgccagccaggtcgagtttggtcacgatagaaatcggaccgaccatgcggatcaccggaggggggtgcattggtaatcgtctcaaagggacgtcctgcgcgtggcatgctcagtgtgtttgtaccagacggggttgtgacccgaatcgcatcagggttgtcttcggtaccgcactcaatgcggtagccggggggcaaaaaggtattgaatccttgaataagagcaggatgaccattgaagagtgtcgaaacacgttgaatcacaccaggcgtatcaatagcctggctcttgaaatccttcatgatatccaagaaacggttgtaaacatctggttgatcaacaaaccgcaccttgacctggtcgaggtagctgagagcatcgttgagaatcggttgctggccctgggcaagagctgcaacatttcctggaatttgctgaccggcgttgttgtacgttatcataggctgtcctggtggaccggggtgttgcatgtacgagcgaggtgtgccatcgccgtgttgcatttgaggaccgaacaagccagccgcagactgaggtccgccctggtggctgttctgcgggtttccgccaagagtcgagaggagtccgcccgggccatgaatggagttggggactttattggccacgggttgatggagaggaatcgagccagtgtggctctggacagggtggtggttttggtcgcggcgatctagttgccgctcaatttgttcgcggtggtcgcgctcgcgctcacgatgagccatttcttcgtggcgctgacgctccatgatctcgcgctccctggagtcccgctcccgctcgcgattgagctggggagaagcgtgttgcatggcttgaccaattccgggaagtgaatggccgctgttatgcgacggacctgcttggtgctggccgtacgcggaaggttggtgcggatttccgtgggtctggcttaattctgccagtccaggaagagaatggccacccgactgactagggtggtagggtcctgtaatcgaatgattgttagttaaaacgtttttatcattggttttccgtagaaatcatagttcagaggcactcaccacctggaggggggagtactgggcccgagggctgcgaggcttggccttgctgagagggattttgactgttgaagcgcaagaatatcggattagtctttgatctcaagccacctatagaagtgctcgtacctgaatgaccccaggggccgcggctgctggttcatctgatccatgccaggatgcgacggcggcccaccggaggagtgccagttatcgtttccagaattcatgatgtatgcacgaactccggtgtgagagaagtagaaaggtaggtttggcggataagaagggtcgagaggggagaaaaagtaacagggtctgctaatcagctagagctcgtggtctcgtcggtaggaatcgactggcaacgctcaggttgcagtagggtcacagcatgacccggagtcttgcagattagaagacagaaaccgactccacgcagcaagaaagaaccggcagagaagtatgatagacaaggaggagacacacactggggtgatggaattgcgcgcgaccgatcgcgggctcctgtggaggctttcctctccggggctagcctcttctggcttagtaggtgcttatcggagatttgattatccgatgggtattcagaattcaattcattacggtatctattgtatctattgtatccattggcgggatttccgtcaatgggaggcggtacattggtcacgcgtggtattgtgcgataggtcaatttcagtccgccttcgtcatcgcccgccattgccggcagaaaaacaatggctgacattgagtgggcaggtgaacaaatgtgaatagcatgagtcatgaatagatcaatgacttgaatagaactgttattgttcattgtatattctattgtagcaagctgcataatgagactcgttctgaaggctggggtacctctcgcttgttaagcctcggaaaggggcggaggataagggctggctaacaatgcgtggccttctttcagtactttattcaggcgaccaagcaaaacatctaaaccatatacttggaaatagggaaagacttaacatctcaacactagttgactaccatatctatagtctgtactaactatggaaatggcctcaaacaggcatgacattctctatcatgagttggccaccatacaacgcctttggcaaccccacagcaatagcaggaaacgagtaaaaggggacataggtaagaaagactaggtctccaagactcagacagatgagttccacaataagaacagagatagggaaggggagggaggatagtcctgtgattatggaacctgtggcttgctgtcattattttctggttttcattcttcatatcttgcctgttcaccaaggccctccagccacccgatccaaacccagatgcgcctgtccatggaaaatgataatggcctcgtgacggtacggacttggtccgattaaagagcggagaagacaaagagctatatcgcaattagcattgtaaggtttagatagaggtaatactcacattgtttgtcgccgcaattgcaatgctgtcttcgaagggatgccagctcatgtgcaagatctttttgttgaagtcgatctggtcggcatcggtctccttcttcatgcgactaccggggccggcagggctgccggatcgcgaaccagccttctttccgttacccttgctcatcggcgtcggtacaccaaccttctttgccttgaatgccgacttgtctgcctggagcacaatctccgtatccttttgttcttctgtagggtaaatcatgaagttgttgttgtaactgccggtcataacgttctccgcatcgccagagaagaccacctcgaacttatcaaagatgctatcgttctcgtacgtatcacagaggcgagggcgcaggtgctcgtggatggggatggtcttgattggctggcgttccatgttgacatcccaaatcttcactgtcaagtagtccctcgacacaatgtaccgcccgtcgttggagaatcgcacatcggagatggaggagataatctcggagaagaaggaacgggacgaggcatcctcttcttgttcgaactctgcaaacagtcagtaaatgtcattggcgccattccagctgtacatacgcttggcgtgttcgtcacacaacgccctttgtcgcatatccgcaagcttgattgtgcccttggagctggcatacatgaaccagttacagctaaccgggtggaactcggccgcagtgatgacctctgtgagttcctccatattagctggcttgatatccacgatgttgaagctctgatcttggatgttgagattccataggttcacccgcaggtcgtcactgctgataaaggtttcaccatcgctgttaacggagatgctatttatatgatacgcgtgagcgttggcgtatgttctccgcggaacggcggcgacaaccgtgtcatggtgtgtcagacgaggcagcttgagcgcagaggggtccttgaaggatatgcggggtgcgcgagccatacccccaccaccgacaggattcgcgggggtgagttcactcgataagttgttctcggcgaccactttcagcgacttgtcgaagaccttccaaagctttatcgtcttgtcgttcgtcgaaaggaggaaatgggatgcattctgtcgtcggcaccattttatcttgttgatcttctcttcaatctctagcgacttgagataatcgaactctggctcgtgtgactggaactctgtgtggaacttatactcgcaggtttttttctgtattgtttagtggttagccgcaagacaagaaaaccttgatgacggaggggtggctaccgtctcatttcgctcaaacaacaccacccttcctcccttgtcaccagtggccaggtagttaccggtatggtcaaattcgacggttgagatgatgtcggctgcatagcgcgagtcagtcgatgcattctgtagaaaatgaccaggttcggccgagaagtgcgagggaggccaaataccttctgtaatatcttctacatcacccttatcgccgaagcatctaatatcaagttagctatcattcaatgactgtgattggtcgatggcgctggacaaagggaagaaaaatggaaaccataggaccagaacctttgacaggagtgagccgggcaaacttactgtgtgaacttccaggtaggtgtgcctgggtctctgtctaccattttcacgttctagctagcccttgaacgcgacaagggcaaggaccaagataggagggacgggaaatgcgggttggcaagtgcctctgaaagctctattgtcgatgcaaagaaaccctcggattgaagcgatgtagacgcgatagccgacaagaaagaatccggtcgggtgggaagaacgattggatacggagatggagagaacagtcggtcaccggagatggtgtgcgaggggtttggagggcggatagcggtaaggcgaaaagaggggcagagggggggaagagcaacgatccaagttggaaagacgagctgaagaagagctgttgccgaatgaaatgggcaacgtcgctggatgatagaacacaatgaatgtgttatgagtggacccgcagcgcttgagaagggataagagaaaagtttctattgagcggtcttgagttagaacggaactccgtaaaagatatatcaaacgctccatcggttgtggggatgggggttgcgtacctgatctggagcgatgaaggaaagacaaaagaagttgtcaggtgaagttgcctgagtcgaggcggtggtggggagagagttcgttacgagataccagctgacggttcttggcccgtcaatatcaacagattgtggtttcgccaaagatgaaaaaatataaacttgattagaagattgaatattctatcttcaccagaattcaggtcgggctgcaacatgctgacatcaacactgttggcgactgcaacatggcccgttgcgcccctccccggccttgcaacccgtatacgactacgcctgggggtagaggtggaatatcaattgaaatcgtgagatataatctagctaattgcttggatcgagcgagtctacagcagtcaattctttatttcatcgtctatatgcccgaagctgtactatgcgcctctgtcgtcatccttgaggcccaagcagtctccgctaaattaagcattggcatatatcatatgctatctatgttgtgaagagatgcgatactccatcgaattgaaactatttattcaggtccggggtatccatttgagaactcagctgggtatactcggttcttctggaagtatatatttgactgccgagccctgtcgtttctactctacctaagccctaattaagatcctataactgaaaagactctatttaccttattaactgatattaactcttatataacatcccatctccctattacagcctataggatcctacattctaatcccactcaccatcacatgcttccctccaatatccggcccaaagcatattaagccgaacacgccgacaaccttggaatcatctcaaatttcaacctcacttaatcctacacctccaacccataatccctaatcccaaaaccaaacaccaaagccatgagcaacccagagaatatgcggggcaatcccaactccaaaccccaaaactccaataccccagcctcagccccagccccagccccatcatcctcaacctcaacctcaaacacatcccaaccccctccctcccccgcgcccccctcgctagcaacccgcatccaaacctccgcaacaggcctagcaaaaagcgccttccagccaagccccgacctagcgcagaccctagcatcgagcacaagcagcaaacaagccggaccgccctctctcccaagcacacagacaagcagggatctatccacaaccacaccacagcatggaggccccagttccagttccggctctgcagcacaatccttccgcgaaccggatacatatacctcgacgggtggattcggtctaccggcattgacagaagacgagttccagaacacatacgcatacaagcgagaaacaggccttctaggcacaaccatgactccaaccacaaccacatatacaaacacaaccgacactacccacgaagacctccaaacaaaaggaaaagcccgcgcccacgacccaacccagcaccagctcgaatccgtctggcagcgccaatcgcacgagccacacagccaggatacatatacatcgctgacatcgccggaagacgggtcagcggtcatctcgctgctctcggacgtaaccttcgatccgaatttcgaggaccccgcgacggtgccagatacagaggttgatattgctgctgcgccgggtccgctgtctgcggctgagcgggaggcgctggattcgttccggaaggggatggggctggatggggacgataaggggcgggtgggacggttaacgggtgcgagtctcgtgcctgatattgatgtttttttgagccagggacttggagggaatgtttcgacgtcggcttcgacttcccttcgtgatgcggttctgacgaatcttcctggtgcgggggattggattggcgttcaggataggtatcatgatgaggtttgggggtttttgcagcctgtgcttgaggatgcgagggctgagattgaggagaagggggagggattggggcctgcggaggatgggcctgctgtgaggaggttgaggatgattttgatgcatatgaaggggtgattgtatgtgtttgggatatggagtggagggttgggtgtatgttctagtgcttttgtagtagggatctttggtttttttcgatataccgtgtacatttaaatgtaaatattagagagggagtgagtatgtatttggctgtacaaagatgatgggtaaaacatagtttttggagcagacctaagccctgaacagagggactcaccacagctaccactacagtacaactacatcactcccaaacatatatattccaagaatatattccaaataagctatgtatgtatgttacacaagaaccaaagttgacccaagtaaaatcttgaatcccgaggactgcaaaagcaagcgtgtcaagccagcacaagaaacaacagaaagagaagaaacgggggtatgagagatcacacgctggaggatcatatttcatcggagagcggtcatcaaggagaagagacataaaggagaagcagggtttaatgtaaacctacaactccaagctgggggtctggcccttgacacgaccgatcacagtctgagcggcgtacttggggatgacctcgtcgtcgtgcagcatggcgaactcctcggtagcatcgcgacccatgaagttgtacagggcgtttgcgccgccggggtgctcgtcgacccagttggtgagatcgaggatgacgcccttgaccacgacccagaagtccttcttggtgttgtgctcggcgacttcatccatgctgtactccgtctcgggaaccttgaaggtcgcggggtcgggcttgggggctggggcctcggcgctggcggcaggtgcagcagcggggacagggagagcgggcaggctgccgccggtggcgccactgccccactcgacagagatcttgcctggggtgttggggtcgatgtggagagagagctggccgagacgctgggaggcggcgccgccgccgttgctgaggagcttctggaggaggtgctgggtggcggagtcgcctgcgacacggccgtagacgacacagccgaggagggaggaaccgccgagacggttggcgccgtggacgccgccggcgagttcaccgcaggcgtagaggccctcgaagggcttttcctcgctgttgaggacctgggcgtgctcgttgatctcgatgccgcccatggtgaagtgcagaacaggctccatgacagagacgtggaactcgtcgtcgagcttgaagggcatgttggcgaagaagcgcttgttccaggggtccttcttcttgccttcggcgatgaggttgtactcgtcgaaggtcttcttgagggctgcttcgccgcagccgatttcggcaacgagctcggcgccggtcatcttcttcatcaggccgcggccggtgtagtgacgggtgtggaaatccaggaccttggaggctttgctgttgaggacgaggcggatgggccacttgcccttttccttttcttcccacattttgccggagacgtagtcacggtgaccgagctcgtcggagaaccgctggccgtcgcagttgaggaggagaccaccttcaccccggagggcttcggcagccaggaacttgaacttggcgccggggtccttggggtcgacgagaccggtagggtggacctggaccttgtccatgtcgatgccgttggcgccaatggccatcagcatcttctggccgtcaccagtagcgtgagtaccgttggtagaggacagcccgtaggtgtcggggcggtacttcttgaggagagaagtctcactgaagtcagcggcgtaaccaccggtagcgagaatgacgacaccgtcggcgaccttcttctcgccgtcaacagtgtaggtaacgccggtgacattgttaccagacttgttgacggaggtgacgtcggccttcttgatgatctggacacgactgggctccttctcggcgagatcttccaatcgctgcatcagggcgtaggtaatggccataccggggaacttggcgtcatgaccgcggtgtgtgcgggggaaagtgtgtcctccgagacgggagacgagggtgaggtcgaggttgaagacatcctgcagccactcgacggcggcggcggacttgtaggtcaggaccttgatcaggtcgggacgggccttgtcacgggccgacttgagggtgtcatcgtagaactgcttgacgctgtcctggatgccgagatcgacctgggtgcgggtgagagcaccgttgataccggaagtggccttggtagagttaccaccgaagaacgcctgcttgtccagaaccaggacgttgccaccgttgaggtagacggtgtgtgcggcactgaggccagagactgggagggtcagctagggcagagaatgcggggaaaggaagcttacggccaccaccgaccacaattacttgaggtgcagccattatttatgtatagttaggataaagggaaatatggggaggaaaagaaagaggaaggagggaaaggatcttaaagaaaaggaccgggggaggtcagaagccgacggtctatcggccgaggcaggacatgggaggacgtggggagacaaaagatggggtacccgccggacgactaattggccaccgctggtttgttcgtattatctggggaagacgggatcacatgcgatatagggatggatgtgtttccaaggctattaggttgaagtctagaatgtcattttcatttcattttcacatgcgtcttggtgtcacattccagtcctttcaagggctgaaaaggaggaattggataggtccatagtcgacggaattagactattgcaactagaccggtgggttagaaacaaatacaataaatagacatcgaattccggcttcctcggtctttacagtaccaggtgccaacctcggaataacaatcgcggccgaagtatccgaattgtccacgggtggatggcatgatgaggagaaagtaccacttaagttgaatccttgcaagtgggcagacatgtaatccagctacacccatatatatcgtgtacagaggtgtataatacggactttatatccccgtcgatgtctgcgatatcaaatcgccagcccaggggccttggaaatggccagaaagaggcaaaagcagttgccggctgaggaacacgtggctgctgattggtggaatctcggtgtggggctgacctaatccggggatgggaaatgcctcggtggggccgatgacctcatggatccccgtgcgtcgattggtgtttttcgcttcaaatgccgaccttcttggtctgctgtatatacacttggagaggagcttcatcggtttacactccaccagaccttattctcgttgagctcaacattacatttgcctattgtgaatatccgctacggtcgctcgggtcaatacccaccgagaaaccatcaaacgggatctgtacgagacgagtgggctgttgggatataatggacacgccgatggatatggtgtactccgtacatattctaatgaatcaaaacgcttatggcagatccaaaaaaagcctaatccatccaggtaacactcttcgtaaccaagaactcattcaatccctcatcagtattgaaccggccccagccactattcttcacaccgccatggggaagagccggctcatcatggatcgtcatgctattaatatggaccgccctgcaaaagtcagcacagatccacccaaatccgaatctagatctgcaacaccaacatacccagattgaatgcgtctagccatcgccaagcccctccgcagatcctccgtgaacacagacgccgagagtccatacccacttccattcgcgagacggatcgcctcgtcctcgctgtcgaagggcatacacgccgcaacggacgcgaacgactcctcctgccacagcgccatgtcttccgtcacgccgcctaggacagcgggcgccatccgcactcccgagtcggtggggacgctgtccgcagacccggagatgaagtgtgcgcctgccgagacggcgctggcgatgagggcttcgacgcgggtcttggaggctgtgttgacgagcgtcggggggagggctgaggctgctgcgccggctgcgagggccttttgcagggcttctgtgaaggctgggaggatggaagtgtggacgaggattcgatcggttgccatgcagatctggccggactaacacggaaggagataggttagagacagatatagatatgcgacgtgcgacatatactcacattcaagaatgcacccgccaacactccctgcaccgcagtctgcaaatcagcatcccgacaaacaatcgagctattcttcccgcccagttccataagacaaggcttgagattctgaccgcaggcgcgcgcaatcttccgaccaacagctgtgctaccagtgaaatttatcttgcgcacggcctcgtgctcgatcatggcattgacgacctcgggggcatcctgcggggcgcagtgaatgatattcaaacagccagcgggaaggccagcatcctcaaaggcacggccgatagcccagtagcagcggggagttagctcagaagacttgaggactgtcgtattgccagctgcgagggcacaagccgcagagcgaatgccaaacacatagggcgcgttcctgtagaaccaataatataatcagcctgctatcaatagcattttccacacccgaggtcgatataggaaataaagttctcgggaaccagtacccaccacggcacaatccccagaataacacccatcgcctccttaaaaacaatcgcactctgaccctccgtctcgacgaccggcacactgccacatatcgacgtgatgcggctcgcgacttcgcggagcatgcgcacggcgagcgggacgacgaatcccgcagaggcgccgacgtccgcgcccatttcttgccgcatgtactcggcgttcatgttgaggcgggcttcgaggagatcggcggctttgaggaggatgtcgcgtctcacggttggtttggtctgcgaccatgaggggaaggcggcggaggcggcttcgacggcgcggattgcatcttggggtgttgcggccgaggcggtccagatggtcgtgttggtgtaggggcttgttactgggaaggtgttgggggttgtttcttcatggccgtttatgaggagggggacggtgaatccggggttggttgagtttggcatggtggggtacggggtagaggtagggtagagataggagtagtatgagtataggaggtatgcaggttgttgtaggagataatagaggcagtattaacctcggcatgaatatttttactcctttacatgcattgtattctatctcattccgcaacaattgaattcggagctgatcgcggacgatctttaggcaccgcgttgcctaatggaactattccgcgatatgcgaccattatttgatcgctttccaccgtctaatgctgatttttttatacagatttcgtctatactgtacacaaatcggcacattcaggggtatccagtgatcgacaagatatgaggtaactgaagattgtgggattcaggtccactgcgcgcaattgggcttggaagagcgccctaaccagctatctgaagaacccactccggtgtggcctgtcttcataggatgtgcatttaccccgccaccttctttattcggatgcgttcgcagtagcgtgtcaagttaaacttcgcctcggctgtttaatagcgcggattttcaacgctattgactcgggatctacattgccagtttaaccgagacttgggagagaagtgaattgtgggtgagaccatagtggcgtccggatggcttttcagtctgtggaggtcatacatgaatatgtatgcagtacggagacggagtgtgcacatacagatccatgaggatatatggagtaggatccaagtgcgaatatggatacatagtctaatggcaatagtccaatagttgatccttgcaaggttgcaatcggctcaagttcgcatgattcagtctcagctggtatcagatggcgatcgcagggatatcccttcctaatatagcggctaacagcccctacttggatccactgacctactctacagagaaagcatttgtcattccttgaaagaagctatgctttgtatgccgttgtgcggtctccacgatacatcgctaaagacccaaaaatcagaatagggtctactcttctgaaacttgtgatggatctcattgcatcatccacgtggttcagtcgcgtatattccgcacgaaccagatccccattaggacaacgatcggccactaggggttgcgtgtgagtggataaacaatgggaatgtggaatctcgagctagcctagggttccagggccccggactgatctggacactcgcgtggtacatgttttatatcggaggaacgcccagagattgtgtttcccattcattcctttcttattcatacataccataccttcttgttcggttgcagctcactcgttcaatattgggttgcatattgaaagtacaatggcgccaagcaagaggggttggcagatgattgagatcgtttcggtcttggtcgctctgtgcctgatctcgctggtgctgcgtgtctttgctcgcattcgcaggagagtcgggttcggcgtcgatgattatctgagcatgctgtccatggtgctcctgattggcatgttgatcgagctgattctttgtaagtatgactccaccgactggaattcatccgtactaacggctaccagggtgtacaatcggaggcaatggagtccatatcgcggatctctcccccgataccctcgtgaactactggaaggtacataccccgcaatatccaatatcaacaacccaacctaacaccgctagatcttcctcgccaaccaattcacgtacttcctactcagcccttctatcaaaatctccatcatctgcttctaccgccgcatcttcgcaaccccaaagttccaaaaagtcagcttcggcataaactgcctaatcgccgcatggggcacaggaatcttcctcgcgtgcgccggacaatgccgacccttacgctcctactgggaccacagcacgaaaggaacatgtttcaacgcgaaagaattcatcgtcgtcaaccaagccttcaacgtagtcatggacttcgtgatcctcgtcctgcccatcccaatgatctggaacctgcaccgcgcatggcaagacaagctcgccctaaacggggtattcgccctcggcaccttcgtctgcttcgccagcatctaccgcatcgtcgtgctcttctggatcagcccgtccgacccaaccttcaccgtctaccaggcgacgctgtggacgcacatcgagcctgccgttggtctgatctgctccaacttgccgattatccgcggtctgttcccggcgtttaagctgaccacctcgcgtaatggaacgggtccggcgtatatcaataccgattacacgaattctttgttcttgtcgaattctggtccgcgctcgcccgatctcgagtatgctaagatgtataatgcgcagatcgagagcaagccgcctggttaccttggtgatgatatccatccgcagacgattaatgttcagacggatatttctatcatcccggggaatgattctactacgaggctgaaccactgaggtggtgtgctgttgatttacgccgttacgatgtgatgatatttttatcttctgttttgggacgggatattggagcgaatgggtttattttcttggaggaaagccgaatctgcttcggctgtagctaggtcggaaatggcctaccggatatcgtaataggactaaacagaaggggctgaagaggatgcagagcgggcatatcagtatgccacttttccttcactttatgttcatacatatacgatttacctatgtacacaatgaatttcttcgattttgcctaataattcatactatacctttcttgttgtgatatttataccaaaattgttatttattcatggatttagtcgaaaacattcagaagtacgttgatagaaaggtgtatgaagccgcagctttcgctttgcaacgacggtattttaattaagtatagtactcgagagacagatgcaacgtatatcagcaatcgagcgtgatttccatttctcggacaggctaaaaggatatgcaagagtagtagaaggcatgagttcgtaggtctttcatcaggatacacagacgagatagagcagatcattcagtgcaccatctggctcgtggcgaattcctagaatcaaatattagcaagaagaccaacctcagacagaaggaaagacataccgggaactgatcagagatactagtcgcaacacgttccacatcctccgcaagatcctgcacaccgagatcccactgcctcagcttcgtcccgttagaagcacccgccgaggagccaccgagagtgtcagcatcaaacgagataaccccatcaatctgatcaatccggccacgtagccgtccctgctcaaccatgcgcgcggcataagcctccgccttctcgccagcagagacatcacccgaagactgcaaccccaggatcgagcccaggtcatcaacgtggatattctcatacagcttgctcgccgccacgagattgtgctcgataaccgccttgtcgagaacggtcgtgccgtccgccgtaacagcgagctggtgcggcgcaagtttcttcgcgaacgcggcgacttcgtccgctgtaagcagcctgtccaggaacatcttctccaagatgccgaattcctcaacggagggcgtgcggtcatctttgtacagacgagcgagggagcgggagcgctgcggaccggcaggcgcaaggacagcacagcggatcgccgcggatagggccgtcaggcggtcttcttcgtcgacgcccggcgcaagactcacgttgaaatattcctgggcggcgtcaaggaagcggcggcgggcatcgaggatgcgggcctgggagagctggaagtagagctttgcatcgtggtcctctattttggaggggaggttcttgatgcggttgaggaaggcttcggcgttggtggtgtcgtcgtcttcgaggtagtagcgcacgatgcggatccagaggcgggctttcgcggcatctgagactaggcgctgcgagctgtcgatgtgaatgccctgtagggtgcgggcggcggctgtgtagtcttcctgggattcgtaggcgtctgcgaggatctcgcggatctgcgagtcttgttcttcgacggaggccgagcgcgtgtggaggagggtgatggcgtgctggccgacttttatttttgtttccgggtcgagggattggaggactgtgatgaaggcgtcgaggagggggcgggcagcgacgatgctcacttcttcgctgaggattgagtctaggtagtagactagatcttgggcgagttcgtggccgctggaggttgctaccatctcattgaggagctcggtgtattgctgtagctttgttggctggtgcgggtttgtttcgatgcccgctagggcgttggtcatcttttgggaagccatgctggtcgagtgagtgaaagaggttgtcaagagagttggacgcggagtggtggggacatccgagctcctgttatcgataagagctggctggatgtatacagccctattccgtagagacagaacaatggaactcatttaatctggccataacacaggtaggattagtcttatgaagatgattcacagatttcattttccctaagtagctatatgcgtaggggcatcttcatatttgaactaaatgcattgatatgcgccttctctcccttgagtgaaaaagaaatcatatgcatttgaccttgacagcgccacaaatgttaatttaatcctttgaaatgcctcggaagtaaatatcacggacggtatccctggtaatcgcagaatatagtgaagcatacagttaaaatacgcatggtcggagccttggttaggcctatcctacactctttagtccctctagtcgggaacggttccgattatgattatgataattattgatgcctcggggtattcaagcttgatgaaaatgtgacaatgtgacaacaaactacaagcaacatggctttctaggatggaggcgtagcgctaagaaccctggaccccggcatattaggagccgacaccgccagcgcaactcccagtaaacgtgtcttcattatctctatcgattgtatctcgtacacctgacccatagccgatacttcgttgttctatctagactcttggggctttacaagtgcccgaagatacgcatcacttgtgaaaggacgcgccaccgttcctgataggatcaagacctttgtctatcacggaaatcggattgaatatcattatggctatacagagtgtcaggtctacccccgagtttgtttcgtctctctactaccctgtgtctctgactgattaaaatcgcatgaagggccctactggaagcgccgatatgcagtcaccctatcccagatgcatccgggaagctcgcggtctacacacagcggggttattcgttcaaatcgcacagcgcgttcgcacagattcgcgtgcgggagatggatacaccaagatcctgggctatcaccgacaaccctcatgccaattatccgagatggctcagccgcagcgagaaagctcatctggctggaggtcatggaaaatgggcacagcattgatcgcagataatatcaccttcaacatgctctctcacctagccagcagcacacaagatttgatatatggaccgccttgggtgaaaccagaggagtggagaaaatgggacctgcacaacatgccgggaactggaagacgccacaattgatcatccacggagcactaaatcgtcagcatcctctgaagccctggctgcattcaacactctgaatttgcagtcagttgagagtgctcttctcatatttccggatgagggtcatcagatccggagccccgagaatttactcttgtggtaccgcactgtgcttgactggttgaagaagcatacaagacaagatgcatgagatattccagaagattcagcaagtgctacgaggttgtcaacctacataagcatcatttttagtagttggtagtcatttcaacgtctttctcgaagtttttctctgactctttctccgagtcattttttgaagtgattgcttttctcatagaatgataagaataatctgcaaatatgcaaaccaaaaaatcccatcgtctgcttgagcttaccaatgccaaggtctagatagacgtcaactctgggtgatagcagaagatagtgaatggcgacgtctggcaacttgaagttgtggttacggtaatgaattctacaggtaaaatacgtatattacgaataatatttacgaaccctgcccgtcaacaaccacattacaagaaccttcaaatcctagaaacttcgacttgatcattgttctgtcccacgaaatggcagaattacaggaagttctaaaagactttattgacattcttgacctaagacaggcctatgtctggaatgcggattccgcgaataaacccctagcattcccaagaaacccacgtgcagaaacgcttcttcgacgcaaattgcttggggatcttctgccatatcctacaatgttcaattgcatctggatagcagagggtgaagaccgaggttgcttcttcttcattgcctagacgatataaggaagcaaatgccttatagacgaagacggccaaagaagactttctttgatcaatgatgctaatatggtgtcaaaggggtatatcatggtcgattgtcacgctcgggtaggggtgtgtctaagagggcaccgtaaaacctatctcgaaacccgaatgtagtgtttaaatagagaaggttgttattcttgtaggttatacgaaggctttgaataatattgtggaactagaaactagaacttacatgtaccttttgtacggtctgcctagcaaaaggtacatttatatgggtagaggccccttgtttgcgagtctggaatttggcccttcagcagtatgaggacaattattatcctacttatgaaagaagaaaaggaaaactcaaactcatcataaaaccagcccaccttgggtatcatttatctcgaaactaagttataccaattaaaaccaatctatatccaatatcacagttcacagttcacaatcttacaattcacacctttgtcaccaaagacacacaccgtctttagatctaaccccattccagtttaagcccactttccaagcagagccatgataccagcaccaaggagcatagatatgaccatgaaagccaaccgcttgttgtcctgagtgcggtgagggtcgaacaagaagtcgcgagcaagcagctcaacgagaccagtgtacaccaagattccagcggagatggcatccagcacaccggagacaacattggcagtgtaagaaccagggttgtaagtagtgcggacaccaagaccaatagcgatggaaatgggcgtcgtgagaccataggcggtacacaagaaccaaggcagccagctccccttcttgaatgggatactggacatgcgggctccaataccgagaccctcgaaggactggtggaagaccagaacagggtaaagtgtagcaaactcgtcaccggcaacaccgaggttcaggccgataatgacggagtggaagataacaccgaactccagaatcagcagcgcggcaatttgctgtctgacagagcgctcgatagccacctcctcggactgcgactcaatctctttggcttgcttgtcgtctgcgtggcgtcccgaaacacgcgagtccacacggcgcacctcgcctccagtcgacataatgggctcggggtcttcacggcagataccgtacttgatctcgacgtagcgctcggcaccgaagtccatgaggaagaccatcatcatggatgtcaatacgattgcagggcaccatgagtagtcggcccagtggccggtcataccgacgcaggaggcgggaccgatttcgtcgtaggcgggatcgaggagatggatgaaggctgttgcgacaattacaccagcaccgaagtaccttgcgaagagatagacgtagactgggatgcgcaggcgtggtacacgttgtgcgaccacggggaagaaggttgctgccgaagagatgaacatgatgacgaagatggcggagattcgcgcgcctagctggccattgtattcattgccttcggaattaaggtaacacacgatgtcagtcgggtcggctgtgtccaggtcgacattgtgaggatcgaaggacattttgggcggttatgttggtaaatcgtgccctaacgttcaaagaaagaggccgatataataagatcgaagaagagggaaattcacacggcgatcttgtctacaggtatggcaggaaatgcctgactgttttatattggagaaaaaattttaggcctcttcgggtcctccgttgaagtgaggacctttgggacgtctcggccccagttatattagtctggtggttaccttgtattgtccgttccaggttgcattactcgcttattctagttgccttggacctttgtatgttattataatatctaattaatgtaaatgtttctaatccgcgttgttgttgttgttgttgttgttgttgtgctgagaacttagggcttccatgccccttgagatatcaaatgcccagacgggaacaaccaccagccctacggacgtttcttttgaaaaccaaggctcggccaattgcttgtcgaatcttgggacgatgcaagcctttcacgcaagtcttgctggtgggccaaatcccgtcgtagtgattgggtgttagcgccacgagtttcccccaaggtccctgaactaagattacgcgaggtcaaaccctgccatcacgggtttttcatcgaggagatatgactgaaacgggcaggtggtgcgtagtagctcgaacttacatgtccatttcatcgtcccatgtgtactgagtatgtttagagatgtggatagttcgtaatataaacatgatctgatccgctccgcagagacactttccgtcgtcaagcgcggtaacggtgctggatcggctagaaccgagccaataatggattgagcaaaggaatttacatcgtaagagcggttcgtgtcgcgtcgtgaagatatcacattgtcatggcttcatcgcattcgttagccttgtcgccacccattggtgggttcagtacaaaatcactcagactaagacaaccctgcgagttaaatccggactttagactgaaactcacaaggtctgagagcactaggagaaaatatttgtaaccatgaaaaagcaaggttcatccaacctgaaagcaggaggccatccccatccatttcgactcataattgcctaacactgccctagccagagcgctaatagtaacataaaacataaaaagatcataaaacaaatcataaaaagcggagttgaatgcaaggtatgcaaggtttcttcataactcatctcgtttctcgtatcccatacccaagatctcccaggctgcagagaggatccgaggtctgtatacataaacacataatttaggttttcaccctgtcgtataatatagtctcctcccatcaaaacaagaaacaaaacacgctccgaagccaatcgctgaaatcatcacacgctacctgtgcccgagtgaacctgactctgggaccgaactcaaaaaaagacagtgaaaaagatacaaaaaacagtaaagtgttgcgtgacctatcgttgcacgctagtatttcaaggccattgctggcacgtatttttcaagaagaaaaaaggatgtcaaaataaaaagggcagatcaagcaacaattcccagcaggaattgtaagaaatgcaagaaatgcaagaaaggtagaagaaaaagtgacaagaaatatggtcttgttgagatcacgggactgacccggaaatcaggagtggaaaataccctcctccttgacggggttatcataaccgtgaccttggaccatgcgacggaagtcccgcacaaccttttcaggcacgcggtcccacatcaaagatctagaatacacattcgacgacaatgcggaatgaatacgactctgctgcgcggcggtatcccgcatcgcagcaaacgcctgctgcagggtagatggctgctggggcttgaagtttccgttgtcattctcaaacgttgtcagggagttgtaatggtcagcgttcatcgagaacacctgatcgcgctgttgctgctctgtcggcatgacgagcgtgttatgcaactggtcgagacttgagggcacgggttgcgcagagctcatctgcgccatctccatgccactgatagttgccggcgcgggtccggttgctgttccatggttggaatgagagttagttagctcgtggccagacgacgaggctaacactgctttcagcacattggctgactccgcccggtactcctcggagagttggggcagggagtttcccgggagggacgtattgtttgaggcgaagaaggcaccgacaagcaggaacatgtagaaggcgttccagctgatcggcaggtctgatccattgttggatttctccgggaccttgacctgagcatggggagtttggacacagtctgattgcaggagaggtcccgtgaccgtcgagaagtcatcccatgagtggttttccatggtcgggttctcgaagccggtgaattcaccggtcatgatttcttggacgggcttgacgctgcgctccagctgtttgtttctctcctccagcatgttgttcctcttcaacaggttggcggtctcccgcgtgtgcctgagaatagtttcatctttctccatgtcctggcgttggatgtgctcggtcaactgcctgttgtaggcagtcaattggtgattctcgtaatcctggttcttcattgcgctttgcatgttctggattttctcctccagttgcgcgagctttttagcctgttccgcgataatttcgtccttcaccttgagcttttcgatattaccctcggcttccttcttcttgcgttgacgggattgcaggctattgtgataaggttaacatgtgatccagctcaacgcatcaatctcaacttacgctgcatcacgattccgcagcagtcgtttgatcgacttgaggtccttcttcttctcctcgtccacgcagttccggatcgcgtcgtcgatgttggccaaggtgagttcggcggagatttcaatgcgggaattcctcttccgaatcccatctcctcgccgcaacggtatggccatccggtaatccgggctctttctcgcttgcaactccgcctcggccagatccattggcgccggcatccagccctggctggattgcggtgacatgacgacgctgccagaagccgcaaatggcatacctccacggtacgacatggggttcatgggcatcgtgcaaacgggtccaaccgcaccaccggagaaaggaccgacggcaccctggtctccattggaagcatactgatcatagcccacggtcggggtacatgagcctgaatccgtacgcggcatgggccacgctgcctgcgagcaactttgctggtaggaagatggttgcgggccgtcaattggcatgaacgaggcacccgagttcatcatggtatgcccgagttgcgaatgcgaattggaattggaatttgactgagactggctgctggtatttgagtaattggaccagacggaatcccgatgtgagtaggcatctggggcgtcgtaggaggtgcggcggttgtcggggtggtcttcggaattcggatcaaggatcctgtcatccaacacgctcatctcgtcgtcttccggggtcacgtctaacgttgatggtgattgttggtagaattcagactggaaatattgtgccatcatgaagaggcggtgtgtgtgagaaacggtggagtggggctggggaagatgctggtttatagagaaaatggtatagaggcaaaccacccaagggagaagataatagtcgggaatcaatatgaagatgacatataatagtaaagaggggggaaatatgctgtgatctagttccgggggggaggcaggatatgtatgagccgatgcagcagtgctcgtgcggttcgatattgtacccacaggtaccgagtaccgatgtaggtgatggaggatggcctgtcgatcaagtacctagtactcatcccgccgtctacgcgggagcgcgagtgtggcccccggaacagcatctccgttattggctgcattgttttgcttgggcagacctgcatttgttgatgttcgactattttggttggtattttggttattcttgaattttcggctgggttttattttatttctcattggaaggttttttggtatattttggttttattatgatcagtctcaatggtcatgctggcggggataattgactacattggtaccaaggatgggaaatgatatcgtatacaacatagtgcttttccttcctcttctctccgtaaacccggagccaccaacaatcctaagtgggggaaggagtcttccttctctttcgggcttatcgataaacgatagcctatcgatcgatcctcgttccgccggccgtagacatccctgtcgtggggaggatatggtctgtgctataccttattcacggcgcttaggtagaatacccaatgctacttcggacttcacctgcacgactacctgaaactactgtttgaaagtatatttttgtacccccatgtactaaactgatcccctttgaatggtcagatgtccagtctaactgtcatccttctttctatccgccgctaacagccaatcattcccgagtcagtgtgacggcttctttgggctgccatccatggcgccttggatgttttgctttttttctttgttgtgctccttattccgattcattatagttcccttccttcgtatagtctaggatgagtctctatagaatgaatctttgggacgggctcggcccgctgatccactgttgggccgaccatggatgagaaaagaaggaaaaaaaaataggaaagcacggatgtcatgcactgatcactcgtcccatccagatgacaacctccccctccaaaaccaaattccccgaatggagctaccctggaggttaaggctcgatagcttagagtaagagcttgggtcgaaaatctcacacacctgatcttgctcaatcttgccgtgatctacttgcagctctctctgcagctcccatatggctgcagcagcctcctttccaactcttctgagctcacagaccacatttaatccatgatcgactatgcggagtgcaggggacatgatgccatcgtattgacgggtgccttccggcttgctgagctgcgggggggatatcctaatctaccactattattaccaatatactaacatctccaacttcgaccacgattcaccatgagctgtcattgagctgtctcttctttttttctggctttcccccacaattcaatcagtccccatctctagccttgcccaaagcgtagaccgggttcctgtcagttcaattccccggagcacacgccttcggcggcagccgctgagtctgttcacaatctatacatagcacacagcacatatcctgtgccagtgataggcctgtcacctgggcggcaacttcgcgggtgggcaacttagcccggataagatctggcggtgaaaaagctgagtctgtccaatggagatccagtatgccaccggtcaagcagtccacccgtggacgggttcactgctacattagtcataaacagggaaatattttcagtcaaggtcccccggcggcattcttgttttttactagctcatgacgcttccaccaaatgcagtatagtcttctagaagccggtcccagtatcatagtcctttgcgtatacaccggtagattcagcacccgtaccttccctattgcgacactggcatattcgcccttcctgcggtgaagctgaaaccaatgttttgccatgtgactcggaatgaaactggtgatctaccttctctgaatgagctagaaggcagtggcaggtccacggtccaccactccacttgcattctaatatttatgtagctaatggtccacttctttcacgctgcatacaacttggaatacgacgtacactgtacgtgcccaagggtctgtaaaacatctccccggtgcaagctagccggatacgatctcaaagcctcactttgaagtggtacctgcctgatatgccgtgcacagggtacattgggcacatcggatgggagtaagccattgccttggaaactggatgtgactgggccactagctgctcactgctagccctcttttatgctccacatgccggattggggactcgttggcgtttttcatgaatgtagtctgcctatcggggaattcagcttttcttggacccgtcgggggaagcatatttgatctctgtgccgaggatcctccttcaccggttgaaatgactcattctgtagtagggcgagagatgaatgaaaggtcttgagagtttctgtcgcttggtgcggttatgaccagctaacacgtcgtcggaatgagtttcaagcaggtggaccaacatacaggaatcccaatattgagacagagaagctattactcagtacttccgctagactgagtcactatctctttttggctattctcgtccgatagactggctttctgctactattcttgtccgaaggattcatattcttttgttggatgacgtttccaattttgcttagagcagattttctatcctgcactaaagcccaacagtcaattccaacgtagtagaacaattagtcttccaattcaacaattcaacaaagccgaaggaccaaaaccaacacaagatggtgttggtagacaagcccatatgcgtggcttgacctagccgccgacgcttccaagtgttggtgatacgcagagtttgcaggatgtcaagagaagagtctaggattatgtctagctatagcccccgacaatagatcaattggttctcaggaattacattctagattgaccttgacaattgctcatttagacaaggaagtgcttgacttcaacccgtacattatcaccatctcgacttgctcaatcgagacatgccgcggcgttgatcacaacgttacatctttgtaaatgttttaaacttgcattccaactattgtctatgactgtactcttccgctttccatttgaggtccaaatagcatccttgctgcctagcactaggtgctatttgatatacccctccatgtctatacttggagggcactgatatatatattgatcacatagtcaaaatactacaacacactacattgaaaacaaagtatacaagaaagattctaggctctgtctgtcttgctccttatttccaatattgctttcgtggctagcaagtttcacaggcttggatcatccttgtaggtctcggaaggatatcctggggtgcagatttcaatattgcgcgctcctataacagtctatctatatttcaagcatcatgcatagcgaggcttatccatacctctacggtcacacaacctcatacttcatgtcaccagtcaacaggacatgggccctgcagttgttgctatcactgtcacatggctcggtgattgccgaagtactatactcaacctgacgtcgacatgtgcaactatggtcagcagacatagaatttaagaggcttagtacacatgcaataagaaacttcaagataacttatttcaatttttttcaatttcttctcaactgaatgctatcgacatgttttcggggtatgggcaaaaagaatgaaaagcaagaaagacaactatccaatcaactacaaatgccagaatttaggatttagaagcggataaagtcttgctgctgcgacaactcgccgctgtccacaccttcgatcagttcttcgggggagtcgtcgaatgtatccgagtcaacgtcgtccgaatcaatagcgtcatagttttcttcctcgctagactgatcagactcatcttcacccaaatcagctttgctagcagcagccgcagcagccttgcggatctggcccgcgcggtcaacatgcggcagctggcagcgctttttgtggcaggcgccggtattggcatagtctgggcactcgtggacgtgcttctcttcgcaggcgtcgcccttttcgcagtatcctagggttgcaaaggcgcggcagacgggggcaccgggtgtcacgcggacgtgggcgtagcgacattccgggttggcgcagcgtcctctaaggaaatgcatacaagtgggggagcgatggggcgaaggctcatgggatagatcacagctactacctgcggcacatttgcctgtctggaggaagtccttgcacatagcgaccttactagggtcatggacgaattggcaggtcgggcctttgtagcaagtgcctagaaaattagacgtattagtttttgagcatacttatagggtagagcatagaagtatggcccgtcggaaaacaaaataccggttgttgtaaatcttttgcaaagctcatcgcgcttcttaacagtatgattcctattgcaaggttagtataaaggtaaccatcattaaaaccaagactcacttcttcatagccacagcaccgagacggtggaggtttccgtttttgcttcgcacaaaggacacatcggcaactgtgacgcgcttaggcgtactgttggcagtactagggtcatctatgaagggtaagccaattcgagaggaagagcgaagggtgcacgcactcgaaatacgaatcagtttgcttccgccatttgcgaccctgaaaggaacatcattgacaagaatctgatggccagctgcaggatttgcagcggtggagaccactgcaccagcacctggaccctgtgcatatcgaagtactttcgctttttcatactctgtttttttctgttctctaagcttgcgcgttcgttccatatcctttgtcctgtcctgtgttttccgatcgtagacagcagggttgatcagctgcatgtggcgatcgtgcttcacgacccaaccattgctagaagatggtgtcgaaaccgccgcgctgtcgttcgcactactcggggcgggtgatgagttggcgctaggggtcgaaccagcgcccgcggtgttcaaaaccagcgtgcggtgtcggtgcggagcagctgctccacgacgtcctcgaccgcgtcccctgtagtatggggcccatcctgtgtgagaagggacatggcgagacacatattgagactggtagttagctggctgggtctcttgcgtcttgtggcggtttatttggccttttcatgttagctttgtcttgacggtgaactgatactgagcgcacctgcaagctgaccgatcttggccaggagatcgtcgttttcgctcatggtgactaactgaagctagatagggtaagtgggtggcagaccggatatctgagattttttcagattaagatcagaagctgggtggtatttcagaagaagttctgagccggtgatgcggaggaagcagcaaagacgcgctcatttagcgttggtgtgattctgggagggtagtttgtactgtttgcatgggttaggtgccttaggcatgaatacaaagtggcgaggaggtccgtgcccgggatgagaacgtcaccaaccaccttgaacagtacgaaggagacaggaaaacacgtcttcgatgcttgtgcagttacatgaggccaaaaaaggactcgctttagcattagaacctaactttgaccttaccggagagcagctccacgtccaacttgacaatcaccaacgaattactccgtaccccgcgtacaagtacagaaaagttaagaagaaatagatatagtccaataatagatcagaggcttgttaaatacactcgatgtccacaccagggatgatcaagcaatgggcaagctaaggtcttgctgaaaatcatccccacatgctgccgctatagttcgcaatgtgtatactgttttatcacacgcctactaggagatctgaagtttacaagaaagccaatcgaaggcgtttagaagtcgataatattgggcaagaattactggctcgacgtgcttacgccaataaccaacaagaaatgcatacgattctggtgagacagcttggtcaaattctcagaggctggtcactgcgaatcctaaagggatttgtcaagacatcaatcgaagaaactgtttgggaccaaatcaatgattgtgtggaacccatttgtcatttcatttcattttattttcgaattgaaccaggactcccggtctttccttgaaagccttaacgccaggacctgcttatgcaatatatcgaagccgttatctgggtgtatttgtttaaacgttttcaaattgaacatcgtcctgatctattccagaagctggatcgtcctctgactcgtaaggatcatcggctcctggtggcaactctgctttagcattgtccatcgcattagagtactgactgtgggttgcctcgggcttcagttcccaggtcatagcgaaatcaccagccttgacaaggtgtgcaaccatctccaaagtctgcttgagatatgcctccggctgtgccaatcgggctttgagtgtcttaaagggccagtatttgaattcgcggaagcattggaagataagatccagaagctcgttttgtggcatgcgggtggacttgttctcttgggatttccctttggaaggtcgtgtggcttgctgtagacgaagtgagtaatctagcctaagaaggaagggaacttccaaagacttaccacaaattgacccctttcggtgggaagagcatggcgcgcctggatgatcttcccgggaatcttatcaatgaagacagtttccttgcgaggtttcagagcttccagcgctcgcttctcggatatccgtcggaattcttcattctccacaggaaggcaattgaattcttcactgaccgcgccggcgagggcagtgtgttctaagaattgtgagcaaatacaactcgccaggtatgcagtgggacatacttggtatcgtctttcgcacataaggctcccatcttttgccctgttcccgccgcttcgcttcacgtttttgggcttcgtatagaaccgagcgcgtttcgccgaatgtagccatgcggttctcaacaccggggatgtccttctcggtgaatacgtacgtattgtgggtgaggtgtgatccagtgcctgatgggtcgaccgtttgacgctggagtgtgtagtccttgggaatctcccgattatctgggcgatcatgtaggcgcaagctgacctggcaaacggacacatgtcagaatccgccaggcaccctgcatacgcatgtttccacttactcttttgatgtcattcggtgtcccctccactctcatagtgccaagctcaatctcctcgtcatcgtccagatgggcccagtgctcccacagcgaccgaggcagacgggagagccacacattctgacctgcttgtgaaaagtctaaatccccagcatcttcatagaggtcttcttcatcaatgtctctcagggcaatatccttgctgtcggggtcttgtttgaagtacgggcgatccgggtcttgcttgacctgcgccatactggatgtgaggtggctcgaggacagtcggaatataggggaattgacggtgtgtcaaatgcgaccgtcaatgcgctactgaatttatcgggagagaaagtggtggatgtggtgatcagcgcgttcttgagcgatgaagtccgcgccacccaagtctggagctattcactcaacctgatgtggtaggcggtgagagctagcttctttatatatgacgacgtctgaccgttcagtattagagtgcataactagctagtaattcatatgctgaattgtgctccgaccatgaatgtggaattacttaggtggtattcttaggaatttaactgagcgaaatatagaaccattcttttgtcctaccagtgtcataacaatcatcatactcgacaaccaacctgctatgttgtaccaataacacgtctctactgtgagtagtggctattcgtatactacgaagatatataagccggttcctgcttgcatctttctcgtaatttctttattataacgtgtgtgattatgaaaaatggcgcccttgtactatgaaacatcgtttcgtcgcagtcttcacagttcaccttttcttgaattggagacgtacatctatcctcatttataaaaatcaaggctattcaagtccaattcttcaatggagtcattcaagccaaaccattcaatgaagtcgttcaagtccaacccttcaatgaagtcattcaagttcgcgaatagggatttgaaggatgaatcggcacaggtgtgggcttgaatgtacccataatgattttgatagtgggccgaggtactccattctggtgattcaaacgccaataccttctgtatgagatctctgtgactgagattcaggaaaggagccgcaggccttggcgaaagaagattacttgactgcatctgaatagtaagggctccaagcatgattgacctgcactcaaactcacagccccgactgccactcaggagggcatcgcgtatttcatgaagtcggaaaactgagtgattgatggcctcatgtctccgtttgttcattaatcctgcgatttaattagatactaagcagcttcagaatttgtctggccttaccgatgacctcatgagagatcggaagcccccaaccatgaacataagttttactcaatgacatgacagccgatgttgtctctttgaactgggaggagagctggaaaaaccaggaaacccataaccacaaaatcaaattccgagaatatgtcataggaatcttttcctccagattattgatccatatgtccgtcatgctatagacagattccttgcattcatagtaatccgctatgacagcaactttggcgagcatttcaagggttagctttcgcggtattcggcggtatttaccatgaatagcatgaagtagaatcaagagtgctccgatgtcccagctctctgcagtaatctccactgagcctttttgcagataaatagtgctttccttccaacccccagtgaggatccttttgaatactgaggacgcaaatattaaatgcttcgcagagacttgaatcttgacaagcggttcatagacttgctcttcagcaggttcttcggcagcagggtcttcggcagcagggtcttcggcagcagggtcttcggcagcaggttcttcggcagcaggttcttcggcaacagggtcttcggcagcagggtcttcagcagcaggttcttcgatcggtggtgatgcaggagatgatactggctcagaagaggaccgaatggctctcaatccttttctagatttcttcttcttcttttgcttccctgaataggttggtgggggtttgatcgcttctgcaggactctggagagaatgatcggaatatgaaacggtcatgccagctaccgtatctccaggcgcttgtgcaaaaggagagtttgcatcacgcaatattatgatcacttcaccgtctggatctatgatatgagttggttggtccatcatgtttatcaaatagactgagagatgaagtttctcttcgtaaaaggcagacaaaattggagactttccggggataggagaagatagaaggaggaggagattacgagagaagtcgggcagcaggtgagaaggtaggtatgcccaaccgacaatgagggggagatactgatgcacgtaggcgtctaggaatgaattgttgagaccctttctgccttaggttgataggacctgctccctaccttgtttgatcttacctttcttaatgaacacacacatacagcctatgatttcctttcccattatagatgctgatgatggatctcactaccgtcatcaagatctgtaactagcgtcatagagataaaggaatagagcaacacaggcctgaaagacacaaaggcagaaaaaaaagcctaccaacatacatgaagacagtcaaatgcctttgataccaaccataacagatctgtatcttggttttcttatggtctaatggtaaaatgtgctatattatgtttcacaatacagatagtttactcccaccatgcagctatccggttaaggtaattaacggcagtctttctaaccgccagtgtgccatatcagggtttgcctgcagtaatatatagtttgtaatataagtattttatatcccggaatacttctataaataagtcgaacattcaagtctaatcctcgatatgcttgaagtcttaccatctgaaatcttgatgcgaaaattctctcattccatctgtagttaaatatttatttcaactatattgcgattgcattgtaaaaatattgttgagcctcaaagtatcgtttgcaaaggtatggtactttactgaaccgccttgcactgcttaagcttggaacccatagaattatccacggcctaataataaaaatgtgtcaacctcaagcagttagtctacagcgtcaacatgttaattggtacttttcatctgggtggcagggtttcagtggtttcattgcggggcggatttagctggcgcttagctgtcgatcaccttctgctctataataaggtgcctgcttttcttaacagacgtattattactctaggattattttcttaacaagtctactattactcacatgacatcagtccaatcacgtattcagtaagactatcagcagacatggaactcgaaatgcgtccaagggcttcggggccactcagaatcctctcacttggtttgtttttttaatccccttggatagaaaatgagggttaataatatgcctcagatggtggtggcattcggggaatctcgagtctactgatcctagaaaggatcatggaaaggatccgcgatgttcatcatcttgattataccccacgcccgtgtgaccatttcgacttgatcgggggtacaagcactggagggtatgtctgtgtgtggtacatacagggttaatgtactaatatactataaggatcatcgctattatgctgggtcggctgggaatgaccgtggatgaatgcattcgagcataccgaaaggtcgcggagcgtgcttttactcgcaaggcacatgccattattccagcacggcccaggggagctttctctgcgcgcgcactgcaggaggctatcaaacaggtagttcgggagttctgcacagaaaaagaatgcgtggaacgtcggcgcaatggtctctctataactgactgtcaacactctgatctaccgtttcgtgagcagacatgcaccaaaacgtatgtagctatttaatgcagagattagattagtattgacaaataacagggttgttcttgcggttacgaaagtgaatattgacgcgggacctacgctctttcgcacatacgacaaatccactgcgcttgatggctgcgctatttgggaagttgcccgcgctacctcagctgcatccacgctcttcaagtcaattagacttggtcgagacaacatcgagtacattgatgcaggattcggctataacaacccatgcgaacagcttattgcagaagctaagaaggtgttccctggacgtagcgatatgcagactctgagtatcggaaccggcattggagatgtggtcggcataaaaaatgggcgcctgtcaatcattggtgcactgaagaggatgactacgtcccccaacagggtaaacaccaacatggaagactaccatggcgacagcggccagtattttcgattcaatgtgcaacatggccttggagatatctctttgtcagactggaagcaggctagcaggatatctgcatacacaagcatttatctctccgagaagtccaaggatatcgagaaatatgtgaagacgtatggggcaaggagtcaacaaaatgagctgaatgaacctcagtttacgaagattctaatagtcgaccctgttcaaaaagttgacgtggttctaggcaagctaaaggcctaccatatgatcccctttgttgcaaatgaagacttcactggacgtgagattgtactaagcaggctgcaagaaaggctctttcttcaaaagaccgcccgtaaagtggccttgtacggaatcggaggcattggcaaaacccaggttgccttgcactttgcctattgggtaaagaacaacatgccacagtattcaatattttggatcccggcattcagcgaagccagctttgagcaagcgtgtacgggtattgtgagagacattggtatccagagaataaagcaagatgaaaacgatatggagatggttcgtcggtatcttagctccaaggaagctgggccgtggctcttcattgtggacaatgcagacgattacgacatattatttggaagcgacggtgtgcgaggtcggctttgcaaatactttccagctagtgacaccggcgttatcttgcttaccacccggttcagtcgggtggcggaatgtttcacgtcacagagagatacaatccaactcttgccaatggaagcaaatgaagcgattgctttgttcgagaaactcgtggcaaatactctcatccacagtcgaaagatgacagaaaagctactcgaagagctcagctggctgcctttggctatcaagcaggcagcttcctacattgaattcaccaatgtatcagtttcacgttatctcgatcttatgcatggtacagacgaagacaaagaaacccccgcgagttgtcattttcatgatgatactcgctacccgcagctgcagaattctattgctcaaatatggcgtatctcattcgaaaagatcaaaaggtcagatcctatcgccgctgatatactgcagttcatgtcttgcattgcgccgaaagccattccacggtctctcctgcctttgtacaaatcggaagcgcaaactgaatccgcaatcaatacgctatgtgaatatgcattggtgaccagagggacagatggagtcacgcttgaaattcacgatatagttcagctcgcaacgctatggtggattgaccaaaaaggcgaagcgttagagacaaccaggaaggtcacgcagcgtatggtcaagacattctcaccgcggggccagaccaatgaacatacgaggagggcgtacgtacctcatgctcttgaacttcttcgtaagacagagggtcgagatatacacgaacggtatgagctcatcttaaaagttgtgtcctgcctcatagatgatggtagggtggaaacggccatggaattactgaaggaaaaggccaaatgggaccaaacccgccattgtgaagaacatccctctgggctgagacctcaaacatttctcactggggcatatgcagcagatgggcagacagaaaaggccatgaagctgagcgagtatatcgccccggcgaaagagagaggaatgcaagaagctcactctgagcaagtgcttccagaatggtttccagcgcagacgagcaagctcagaaagcagcagagctcttcggatattttggcgagacggaattatctgagacagcagagaaatcagtcagcaaagcgcgccctaacctacgagagtgtcagcctcaactcgaaataccttgtggacagctcgggagattacgcgggcgagagagtcactcaggcatgtggttatgatcgggcagagacattccgcccaagagggattcatctctactagaatctcactgggaaatagtatttttgtatgacagaaggagcctatataccacttggaaaaatggggatttgtttgtttggcgctaactaaaggcttcatttaaaccacccaaaaatatggccatacatgaatttgtatggtgctaaaagcttcattttcatagggtcatcggacctggttattccgtgccggcatagtcactgtaaatagatacagaaaagcggtaaattcgggcattaaagcctcaatatcttgaaaatgcccttcgtagataagactaaaacacttatgtaggtgtgatacgactaagaaaccaactgaaaaaagttgcagggttgcacatcaagaattctgtctagctatctaatagcaactggcccgcagcagcttcttaggtagcacactgatcatatttctccccaagtcccttcaaaacgaccttcaccaagccacctaatgtacctgctcggttgatttccactgtaggaatctccacacccagagacctccgtagccaattcctaacctctatagccatgagggagtcaactgccatgcccgccattgcttcaatgtcatctgcagaatctgatccctgatcctgcatctgccctgtaagattatggctgataaatttgcctagttccttcatcaaggcgacctcagtctctctcttccccgtcagcgagggatcagcttgtatctgggcaaggagggcctttaacgcatttgcatgagaggattgatccccaccactgccagcactggtagactcgaggttggggtagatcaaaaaacgagcgtcgcgtccaccgaggaagatttccttggggacatcaccgcggcgcctcgtgtgcgcaagtcccattgcaattgcaccactcgcattagaatcactgactggggatatattgatcgccgcggcgagtccatcaatcacttcagcttcatggagcacatgcagcgcgattgactgtactctttgaaggaatcgggagctccgacttgcggcacctacatctccaaccaccccgaggtggaaaatagaggaagggagcccctgctgtcgtcgataccgggtgaatgcttccaaaaatgtagttgctgctgcataattggcctggccggtgttaccacataccccggcaattgagccaaacacgacgaagaaatcgagtgagtactgcaatgtggcatgatgcaggttccaggttccagtgactttcggagccaacgcagcctcccactcctcgtggctcatctgcaggaacagtcgatcctagatgctatattaggaatggcatttaggagaaagggagaaaaacacttaccttcaagtcaactgccatttggaggacaccaacaaggggccgcgtgcatgtggcaacagcccgcttcacagcttcaagatcggtcacattgcctagcacacagctaacatgacaaccttgcgcctcaagctccccgataaatgcttgatcctcctcagatttgccagctgatcgcgagaggaagatgagctctcgcgcaccctgctcgaccatccatgttgatacggatcgcccaacaccaccaagcccgccaatcagaagataagcggcgtctgatcggaatgtcgggaatcttttgacgataggaggaggcaaactgtccacggaggatggcatacgcaccaagatcttacctaagtgggtgcctgcctgcatatacctaaatgcactgacaatgtcgaccgcatcaaagactttgacaggatggataggtccgattttcccttgacgataccaatctgaaaatgttgccagggtgctgtatgtgttagttcagcttttgttcactcaaggctcatctgagacaaaccttttgagaatctccggggtttccttgcaaacttgtgcgaggtcaacaccgaaaaatcctcggttagcttcgaaaagactcatattaagtattccgtgacttatgaagtcacgttttccgagttcaaccatccgtccgaactttgcgacacattcccacgaagcgtgcagtaagtttcccgacaaagaattgagtactacatcaactccccgtccagcggtggcacgcattaggtccggttggaaggaagtgttgcgagagttgaatatccgttctcgaggtaaaccaaaatgctccatcaaatgggctacctttttatcgttgccgaccgtggtatatatctatattgacttattattagctccacataaaaaaaacgataacgtgaggttgacctacctcggcaccaacagctcggcatacttgcagagcggctagcccgaccccgccacatgcggagtggatgagaacggactgttttcatgtcagtaactaccaatagtcgagttaaatggtgactcgcctggcccttcttcaaagcaccaatctcaagtagtgaatagagaacagtcacataggctgttaacatcgtggccgcatctgccattgacaacccctgcggtagcttgatacaagcttcttgaggcacaacaacgtttgagaccagaaccccagaatgcatcaagatgacacggtctcccaccctgatatccgtcacatcaggtccaacttgaagcacaataccgctgccttcgaggccgagatcttctttgtttccgaaaaagcccattgcaaccatcatatcctagaatatattgatcaacgatatgcaaggttatcttgggcgcagaaaacttaccttgaagttcagtcctacgtagtccatctcaacttcaacatgcccctcattcaactcatatgatggctctttctcggcccagtgtattgtatccagtagcccgtacgtcgtgagagttagctttcgggacgcatctgatcgaggtggacttgcgagctgctcgacgagaggtgtccagtggtaccggccgaccttaatctcgccttcatgcaatgcaaactcatactctggataaggaagggagtgcgcgcgggatctttgtatcttctcgcacacttgaattacggcctttgcacccgctgcatcccatgtggaaatctccagaattgagagatcaattaaaagctctgatcgtaaagtgcgggcgaacccatggatgaaaccgaacagtggatctgagcaggtgcgggacgttgactgcgtgacccacaggattcggcattcttgcacttgctcaatgtaccgttggaataccccatagtcattcttcggcaagcaacctattgcagctccttcaagatctagcagagacacaatgaatttgcctttgggtgggatttcgtgcaaggtagtccagtgagtggtatagcctttgtcgcggaatagcaattcgacatcactcgcccactgggacgggctagaatttcccgtgagcaaccagatatcggtaggaatggatatatcgtctaccggccgtgacaccatgctggcagatatatgatatggcggcttttgatcataagctgttacatctgctccggtgaaacctgctgctcgtagctcccgatcccaccgctcgggtgagatgtacggttgctctgctcgaccatcatccacccctagccaccagccggtaaatacaccctaaaatatgtaagaaaaccagatattggtataaggaaaatttggtacctaccatggtgaaatttgcaattaagatttctgtatcctagtcagtttagtcatctaagctggagggatttgacgtacccgggctaatctcatggagtaagaagcgaccggtgggcttcagaagacaatgcacatgagtgagtgcggtatgaagactgggggtagcgtggagaacctggtagagaatgtgaattcaacgttattgggttgaggcatactagtcaaatacccacattggaagcgatgatcaagtcaaagctatgagggtcaaacccttgttcgaggggatctagggtgatatcaagaactttgtattcaatgcattgttcatgaccgaatctctcggttgctgcagccataaaaccagaagagatatcagtaaaaacatactggctatacatgcgctccccactcgtggacttgagaagctctagagccaaggcagttgcagacccggtgcctgcaccgatctcaagtattcgtaggcctgggttggaatgacagagcgacggtaggaacggctcccaaccggcatactgtgtgtgcgcagcatggaattggtgcagcagattgtccttcatgaggacctccaatgggctactttctccagatataaaggctttgcagttatcgaagacaacctgcatgcaatccgcaagtggagcatcaaaggtaaacttggtttcggctaacactttccgtgtcatttcctgtctgtctgccgagcttagcaatgcccactgagatgaatctgggtagattgattgttgtccactttttttgatattagaagctgcgtccatgatgaatttcttccactttacgaaatgtgatgatcttggctcgaaatcccgaatttgctccgcggtctccagaacaaaaagcgcagatagctgacccaaggctttaatattcatagcctgtgatgtataatcgtgtggcgtagacaaaagtgctgatgattgcaagaaatcaatatccgatttccactcaagatgggttactgagcccgcgggtccagtttcagaatctatattatcattttccaaggcaaaaagataagctccttggatggagagcaccacccgatcgtcaagcatggcaacggcatcgcccaattggccatcccttgtaccgctcttggtccgggcacttgctggcataggtggaccacctggtccgacgaacaaggaatctatcatagccgggacataaattgttgtgaggtgtcgcaacaagccctgagaacaggccacacccatgagttggagacattgatcaatcgccgtgggatgaagcgaatacctgctcccaggcagcccacgattacccagaatggtcgcagttgccctcggtccagtaggatcggctgtaatcttttccaagccctggaactgagggccgtaatctataccgctcctttgaagtactcggtacacactttctgatggcaaagctcgcttataggaagatattgggaatggctctgggggatgatcggacccggctcttacttgaccctgacaatgcatcgtccatctttctccatcatgggccatgattttgaaactataccagccggatggaaccctgtcagccacttcgaccggactgaggctagtcacgatctcgatttggtcttcctcatggaacagtagtggtgttataaatgtcgcattgcgcactgaataactatcgttgtcaggatacagctgctggactgcctcacctaccatagcgacgaacccagcgccagggaatgtgacggccccttggattacatgatccaaaagccagggcacgtcgtccagcgtgaccagattacgccaagaaggctcatgatcagtcgtatcgacgacccgcgagccgaggatttcatgatgcggaaacttccgatgcctccactccctactcagtcgactctcactccaataggagcgatcatgttgccaaggataaggtggaagatctgtcagcgtattcccgggctcaattaggctcgacaaattgaatcctacgccgttcgcataggcctgtcccgctgtccggagtagctggctttggacatcctcgtcatacctaaataaggtgggaatatagactggtgacttcgttgcaagagtccggaggatttgtcgcagaggggcggcgagggctgaatgcggcccgacttctaggaagactggggttccactagtaggtaggctttggatagcctcggtgaacaataccggtgattccagattctgtcgccaatatgatgcatctagtttgcgagggtcggtgatagtgttgctagtcacactagaacagaaaggaagcatttcctgctcatattcgatgtggctagagatacaatgttcatattcagagccaatctgtttcatctggtctgcaaataatgtaagcgcaagggtaaaagcgcagggcacagggggggtttaccagaatgataggcgattttaactgtaagccgccggcagagtgtatctgagtttgctgtcttgatgtttttggtcacatcgtcaaccgagtctttatcccctgacaaggtgacactatgcggactattgtggcaggctacaaccactcctggtgtcaggtacagtgccacttcgtccggggaaaggccaacggccaccatagcgcctaagccttctagcggtttagcgactttgcctcgatagtatgctataacgatagcacttctcatagaaatagctctggcagcatatgcggccacaatctctccgcttgaatgcccgacaactctagatggctcgattccccagccccgaagaatatttactagtccaatttgaagcgcaacacagagaggctgagagaactcggcttcgtggactcgagaaattgaactctcttggcttagttcatctggaaggtacgttagtgaaaatattctcgtaacttcaggggtgaagccctctttctgaccatataataaccaattcgggggatcaggtagctgctgcaatgcttcatccattcttttgatatcttccttgaatgttgggaattcagacaagagctttagccccattccgggccattgagcaccctgacctgtgaacacgaaggtgacatttggggaactggtgttaagaattgaaaatgccgcatcatctatcgctggattactcggctgcaccacagcgaaagcccggtgggaaagatgtgatcttcgcgcagccaaagtgaacgaaagatcatgcaggcggtctgagtgattctttacatagtcggtggtctggctgatacgcttgcgaagagtgtctgctgtgtgtgcagacaaaactaggagctgagggctggaaagcccgagcgatgtgggttgggactttggagagaccgaagaggcggactccagaatagcgtgggcattggatccgccaataccgaacgaatttacgctaatcctttcgggcctgccagcaggccacggggtcggctctagagggacatgaatatctgcctcggtgaatggaatttggggattcggcgttttgaaatggatattgggtgcgatggtcctgtgttcaagtgacaagattgatttgatgatgctagtgatgcctgaggcaccctccgagtgaccgacatttggtttgacctggtgtacaacatcagtaagtggtttggctgtagacagttctgcaaatagggaatactaacagcactgatatatgtcgcttctcctcgggtcatctttgcaacgactgatgcttcgatgacatcgccgacggctgttccggtcccatgacattcaaaaacaggtgtttgctgtatcgcgtcaattcccgcaatccgatacgcgtgacggatcaacctctcctgagatattggacatggctgcgaaaagttaggggtcttgccgtcgtggttgctcactgtggagcggatgacggcgcggatcgcgtcgttgccccgaagcgcgtcgcgtaaaggtttgagatatatgcagttgatcccttcaccacgaccatagccatctgcctcagcatcaaaagtatgagagataccacttggtgacaaaaccatatttttagtcatggcatctgtcatggttgggctccatataaggctcgtcccgcccaccagagctgttgtgcactctccagatctgagtgcttgacaggcctcatgcaggcagaccagggacgaagagcaagctgtctggatggtcatgctgcaaggggtcagagacttttgaaataaagacagcagatcgcactcacctcggacctaggagatcaaatcgatacgacacttggtttgctaatgcataaccaccggttgcgataggaaatatctgcgtcagatgctggggatctttatgcgatatctctagccaatcttccccaaaaccgccaacaaagcaaccgattttctcgccgcgccacttagtctcccccgagttctccaggcactcccaaaccacctccagcaagagccgttgctgagggtccaggcgcgccgcctcgtggggagggacagaaaagaaggaagtgtcaaaacaacctggatcttcttgcaaaaagaatcctcttttcgttttgctcagatctccacaatcggcgctgctagacgcctctcgggagcagcgcgagggaggtgcctcacaaaagccatctcttttattcacgagcatttcccaaaattcatctccacatcgaacaccgcctggtagccgcattgccataccaatgacagcaattgggtccccaaagtcctcctcgtgatttctgcatgatgtttgtccttgtccagttattgaattcatttttggttgaatgatgaataatttgagactggatcaagatggctgcatagcagacaaagcaaaggttgaactagggttggagctctgatatcacaaggtacggccttttgacgatcgattaatttcacgagtagattggcgattaagcaaatctacacacaatatgtacctacatacccagctctgcaagatgcaggaaacacatttcctccgaaatcctccgccaccggaggaatgatatgtacctgaatggcgactaggtcgtatttccagacactgcaaagaaaggaaaccggcaggtagttccaacctgccctccgaaaacagggcattctcaaccctgttcaacgctgctccaacttagactcgcaaatgtgactgcaacacaactagtcaccgaccttctatctctatatcacttgccatattgaagtaagtatatccaaggctacgaattgaagaaaaaaacaagcagcctcattataggcgacgttcttgttggagatcttaagcttacatgagagcaaagctcagtctggccaccaggtggtggttcatcatcactgagatatattgtcacaaaggctagaacaatcagaaggaaagctcggcccaaaaaagcttacaaccctccgcatgtccaacccaatctcctaccttccgggtgttcaccgtaacccaccctcatctaggtattgggtctaatgtggcacacagaatgtacttcgtgctaaatatactgttagacacggcccagtacaacccaatgaccctcaaggggtaatgatctaggtcggttatgtcgtcgcattccgttattcggaattaagaagcgctgtggcgatctcgactatttgttccgactttattgtgtgctgatatggacggtatcttattttgctcgacgcagatccggatatttacgctttgtcaaggggtgagacacttgaagcttccttaaaactggtcagcagtgaatgattctatgccggagctggccgtgtgaacgaggcccaaaagcaagataatgatgtatcaccactctacaagataccgtggcttacaaaaatcattactggtaactgctggtgagattttgcataagtctaatccaatagtacttctatcctcatccgattgagaactatccaggccacccaggtacgttgtctggttgtcctagaaaatttcgttagtacaacaccttctatgttaagatactcacaacttctaaccaggagcagcaaccgaattttaaccaagatggacagcgaatggtttcgaggacaggtcgtcttcgtcacgggggcaactggtaacctcggcggctgcttgttatacaagctagccattcaacttccaaccgcgaagatcttcgtgctggtacggggatctgtccaaaaggcaatcgaagcatgggagcagtcaatgccagagcaagtggaggatgttatcgccacttgcaagatccaattcttcctcggtgacatgacccggcctaacctcggtctttcacccgccaacctatcacgtttacgaaatgaggtcacagtggtgatcaatactgctggtgacatcgctctctctcgggatctcgcagagactataccagtcaattgcactgctcacctgacactagctgctctactagacagtttcactcagctgcagcgtttcctccacatatcaactacatatgtctccagctttctccctgacggcgtggtcaaggagcaaatataccccctatatgaagacccggcagaggaactagagaagattctctccacaggaaaatcatcttatacgaaacaattcgcggctccctacgcactggccaaacacctggctgaatgtttgcttctgggtggtgaccacaaatttcccatccttattgtgcgaccctgtctcatatcaccagctattgcggagccctacccgctctacggcagtgatggtgcgatacctgtacattccttcctgcagatactcctaggagacgcggaatatggacctctgaagcttgagcagacactacctttccatgcagcctgcaatgagatcccagttgacctcgtggctcgtacttgtctagctcatgttgcccaaggcacaactggtgtagtccacgccagcgccgatctttatgtctcccgttcgattggggacctgctcgagcggatgcgccgccatgcaccagagggagccgctgatcaggtacaaaaggctgggattgaccatggagaggtcacggcccccgagttttacaccatgatccagcaatttgcacgagactggaagattgaatgtacgcgatctgctcacctacagcaggtggtgggtcccttgggacttgaccttggcgatcatgacccagagatattctttaaacttcgtatcgagcggctggctaagactcttctggaaaagttggaaagtgctagcgtggcaagcaacaaggtctatccgagtatctcctgaggaataatgactgggctttggtggtattattctacatttctcgtcattggttgtcgttttgtattagagttatcgcatctgtggtattttcttaacaactcatattacatggttcgaagggctttctcgcagagtcgtgctaagtctagattccctttaaagagaggaaaccaataaagcgtgtaataactacatgagcttcctattgttgagtgtggtgatatgggtgttgttgattattattctccctgagcaacggtatagaatatctcagcattcaatgttcaatgctttgtgcggactcaagtatcgagagagagcttgaggtatgaactcggggagagctcgggtgtgacttgtttggtcacggtctagtgtccttcatttgctccgatgagattgtgaccctacgatgttcgaaccgcagttcaaggaccggcaagctacatgcgaaagaaaaggtcacacaagattagtctggtggtatacgtagtatacattccaacctatgcgaggccagtggccgaatgcctgattttgtaggattgatgacttaatatgcctgaattcttccttatttccagtaccgtgcgaagatatcgaggtcttggccgagacgcagatctggtgaagaatggggggttcaaaggtgtgaatggcttcaaaaggaaaagggaaaaagggccccaaggttctttaacagcagctagcctgaaaacagtttcctcgttgccatagggtagacgcacctcgctcagtatatgagacatcagagagcctactttttagggcgggctctacataaatgaggcttgtgtggtgtgatctcagtgtcgaatttagtctagttgtaagttgcttctcttattgtagacctgtttaaatcttctttctgtgatgctctctttgtaccctaacagatgcagttttacgcctttcacaaacagacaaaagtgaagtaaaactctgcctttgcctcttcatcttccctccatttctccttgtcttcattttcatttcacttcatcatctctcgcccttcattcttatcatcctctcccctttatcctttcttctcctctccacttcttataacctaaccatgaagggttcgctcgcaaatgagccgtcgatccagtctagagtcgatgcgattatgctcactactctgctcggctaaagcgagagtacaacaatcccagtttgatcggatctactgcatctatctccagtatcaattccgtcaactccctacatttgcaatacaaattcgcgatcaagtgtgagtgggttctcgaaaaggaacaagtcacggttcgtggactattctcgtggttcagaggggctcagaacctagtcactaatatggatatcgtagaagccaaaagacttggtagggtcgagggggtgttccaatgtcctacatggtggaccacagtttgaaagaaaaggctggggcttctggcacgtctgtatacggcatcgcttcgggcagctacggtgatagtttattcatattcgttacaacgagaacctcactggcccacaacgaccaactcaatgggacgatgaggtccgcacaatgaacccgagaactggatgactcataaatggatgagaaactatatatattcgtcttgcctagagataagaatcctgattcctcagaagcgaagcttcctgcccaggttgacgcgatggttgtatcggtggaaactgtcctttcctagcctgcgtacaggtcccgagtgagtaatgcgcgaactaccacatcggcggccggagcgaacaaaaggaaagacacaccaaaaccgcagcctatccgaagccttgaaggaacccaaccttggaacgcacacactatgacagtacggccacgtggacctcgggcctatcccgaggaccggtagtcattatctgccggcgcacgtgacggagaccttcccgcaacgcggcaagattggcccatctcccgtctaacccactcatctccaccaatacccgtacgtcaataatccacacggggcacgccattcgtcggattacccatgtcgaagccaacgaataggacactccgaaaaatcaaaacagcatatcagttgcatcactatgccagagaccggtcgcgagtacatacaatggatcatcatcatcttccccagagcttacacagtgacacacacgcctaccatcaaccacggatcacattctaacggagctctggtcggaggccgtgacttctggatatagacaccgaccttgtgtcgctctgaggaatgatcaagaacgacacgtcaaaagcattcgctggtctccgagctcgagcatccgctttcacatcatttcctcttcatatgttagctatgcggccggagcaagagggttgaaaccggagctcagatatgatcctggttgagacgactgaaccgtatagcgaggggaaatcagtgatccttgtcaacgactacaaccagctaaaggcattgacttttgctcgtgctgtacaatacaacgcttccagccagagatctgacctggctgtcttttgcacacgtttcaatttacttcgtatcaccaaatgtgccattttataccttcatgctgttcttatgagtgaccctcatcaacgaagcctcttcttgggcgagaggatttggatttctctgaagctcatccatgctggtctacaaataaggttggagagatacctagttatacagtcgctatgataaggtagtgcacgttgggtgtcacgattggcacttgcgggactcgtactttcccgtttggggttgtaccgttggtcgttccttcccgttcgaaggaactcgtttgcgcagacagtcgtaccttccttctgggagaagcgagaatagggctatgcccccgaaggggtaaaaagacccatttgttatttttacgtttgttttgttttcttttccttcttcatacttgatattcgtttagcaatgcacttcttctgctagaaagaacctggcacgtaacattggggacgagaccggtgtgcagagctgggttcaacaagccatgggtcaaattatacgtctagtccaccgattgaggaccccttttcttctgtcagatgtggcgatccaggtattctaccaaatttgtatccaaacccacacaaaacttcgttccgctttattggagatggtggtctaagtccgccactcgggcataccatttattaattattgcctgtagtcaaaatggagtatcccatgtttctttcctcgttctctatgaatacctcaaattcacttatcccctagctcttaggctgtatgccatattttaaaccttccatgtccagatgagagggccatgaacctgagaagttggtatggcattgagctcctagtacctgtcatgttctcacgatctgtatgattatccctcacgtgactatagatcgttgatactttccaggtcacttggtcgcttcttgtttgctatttgcctctttcctttgttcttttgtttgttctttccttcccagggttgtttgcactcgagctaagcgagtcgttcgagttttgcatcgtttgcagtaaatccagctatataaacaggtcgattcccacttctgaacttacttcttctctctctcttcatcattttggatcaacctaaccacatccaacatgcctacctatcgtgtccatcatccatcacatgacttgtctattcttatattcgttcttcagacaacccaaccaccttctaccttccaccttccaccgtctatcgtccatcttccactttatgaggtttgtttcttatctgtgctatcacatattcttcatcttccatcattgtgttctataccttggttaatacctgatgacatgaggctgactgtactagatatgtgctcacatccacattcaatcatccacatctaaattccacttcaaccaaccatctacattcgactactacaatgcttgacctgaaagagaaggaatgaaaagaaacggtcttgatcgacagagtctccgcaggagtgtctctgaaggagacttctcgtcgggaagaggttacagcgtgtacccatttaaaggagactctcaagaccgtttgctgtggtggtaaaaaaaaaatggtcgcctcgacaagcaagcatcaacattcaaccatccacttcaatcaaccatccaaatccaagcgtctatatccaagttccacttcaaccatctaccttcaagcaaacatccacattcaatcaatcacatctaatcaatcacttccaagcatccacttccaagcatccacttccaaattctactgcagtcaataatccacttcaaccaatcatccaaattccatttcaaccatccaccttcaatcaaccatttcaagtatcctcgctcagccttactgtgacgggcttaggcagcaaacacaaaagcaaaagcaaaaaaagaaaaaaaaaagaaagacaaaagaaaacacgtcgaatcattccaatcaaccacatccaatcaaccacatccaatcaaccacatccaatcaaccacatccaatcaaccacatccaatcaaccacatccaatcaaccacatccaatcaaccacatccaatcaaccacatccaatcaaccacatccaatcaaccacatccaatcaaccacatccaatcaaccacatccaatcaaccacatccaatcaaccacatccaatcaaccacatccaatcaaccacatccaatcaaccacatccaatcaaccacatccaatcaaccacatccaatcaaccacatccaatcaaccacatccaatcaaccacatccaatcaaccacatccaatcaaccacatccaatcaaccacatccaatcaaccacatccaatcaaccacatccaatcaaccacatccaatcaaccacatccaatcaaccacatccaatcaaccacatccaatcaaccacatccaatcaaccacatccaatcaaccacatccaatcaaccacatccaatcaaccacatccaatcaaccacatccaatcaaccacatccaatcaaccacatccaatcaaccacatccaatcaaccacatccaatcaaccacatccaatcaaccacatccaatcaaccacatccaatcaaccacatccaatcaaccacatccaaattctacttcagtcaacaatccacattcaatcaactacttcgagcatccacattcagccttcctatgaccggttttggcttcatgacaattgacaggcttgctacgacagcaaacacgaaagcaaaataaagaaaaagagaagaaaagaagaattaaaacacatcgaacgatttcaaacaaccacttgaatcatctacattcaaacagccatttcaagcatccacattcagccttcctgtgacgggttttagcttcagggcaattggcaggcttgcaacaacaatacaaaaacagaaaagaaagaagaaagaaaatacctcgaatgatttcaatcaactgcttcaagatcctgcatcctaaaaaccacttcaatcagaaatcaacattaaaccatatctacaatgcttcgaccttgaagaggagaatgaaaaggaacggtcttgaaccacaagagtctcggaaggagtgtctctgaaggagacttctcgtccggaagaggttacagcatgttcatttaaaggagactttcaattgattcatttattgattctacctgagtttaattcttagctgtggtttatgcctataaaaaagactatgtaaatatgctatacaataggctgctacaagggatgttacgaatggagccattatctcttggccccaaatcctcggctttcccatccaaataaatattcagccaatcttgtcttatagtgaacgttatgcttgctatcacacttcgattatttgtacatagctaatctcaaaacagctaacacatacagaacgagccgctcaataactccatcactaacccaatactccaaaaaatgctaaagcaaaccactcagttcatcttgacctggaacaaatagcgctgtcggatctgcgcaacatcatacacaatgtactcattgtagaacaggccacggttttcagataggtgggtgctgccaatagccacatcaggcatcttcacaccctccaaagccggattcaaacatccagcatccttccatccaccaggaacgttcaagcccttgccgagtgtagcaattttgccagagttgcgtgcatcctcgccagcgttatagttgctatctacaagttccagcatgggtgcaccgagctcggcatcgcagagaagaagcaaccccatcccccggctgttgtaggcacaacagtagtttgcggatttgctcgaggtatctgctaaatacacacccttgccgaacatgtagccgttgacgggtgcttcgggcggcgcaatgcgcaagccttggctgaggataccaccgaagtttgtgctgcgagatccatgccagaggaggcggcggtcgctgtttggaatgctggcatagggggaggtgttgaagcggtcgttttcgccttggcgttcgatacggaagatgttcacgaccttgtagctcatgttgtgtgtgtcgccgcgagagttcttcaagtagttctcgagttctacgaactcggttgatttgtggtccactgggcaaggtcagtttggtgtaaaattgtacgttccgcaatttatactcacgttcggtcatctccttcatacccaggctctggaactggcgatccagcgcgtgggtgtcgtcgccttgcttggacgataccatgatttcattggcaacgtccatatccgtcagtgcttccagcaaatcaatttccttcttgatctgcgcatttgtgttcaaggttgggggccgatggcggccaaagacgtgaggaatcaaggtgaaatatcggttgctcaacgtttctatggcatcattatatgattggccatattttgcttgcgccacacttggtgtaatcatcagctcggagatctcttttagagccgagaacccgcttttcaaagtccggtcgctcagcttcccaagtggtagtttgtggacgtcataggacattgcagccaacgtgtcgagagcatcctgtttgttgaagatgaaagacatgaggttttgaagtcccttggataaggcactctctacctcgggctggtcctcttcttccttgatggttttttccttcttcaccggctcttcatcttcatcgtcctcttcatagttgcgctcaaggaatgtgtactttccgtttttaggggtatcgagccgatccacccatttcaggcctgatttgtctctgaacttcttttcataatgcttcatcgcggctcctaaactgccctctccgaggcaggctgactgcccatgctccccaactcgaccccagcgtgtccaggtaaagtactttgagtttgtaccgctcaacaactggatacgatagaatttgttggcattgttggccgaaacggtctggctcagggtggcatcccagatcagaccggcactatcaatgtaaaccttgggatctgtgccgtgtgttagtctgtgacccccacattaggtgtcgcattgaagacttacccttgattttaccaaattccatgaagccctcatcgactgggacattaatcgtctttttggttgtcttctggatgtcctttgtctttttgtcggaaccatttttgacggggtcttcagtcgcgcttcgtttcttgcttgcgggcttcttatcctcggatggtttagctttgctatctgcaccgttcttctgggtgtcttgtgtttcagcgggagccgcatccgcacctcgcttcctagtaatacgcttgttttctgcaggagcagcatctgcagtcttctgtgtgtcgtcatctggctgcgacgcctggccgaatgaatacttggactccggcaatggtttcttcgcttcggctgattcaagaagccacgaaagtggaacaatgtggcaattggcgacttgggatgcttgtttatctggtcgattggttaataagagagccccgaggtcgtacataatatcgaaacatcgccgtagctattatcatccccaatgcggtctgtcaccgtttggagcattggggtgggagtatattggccattgccaaattcacaaaatatcaaacttccgagatcgtgtatgtggtagtgtactcacatttggtagtctgcttctccacatccttctcggtggtcactagatgggtacattcatccgtgaccgctgtgctgaaagtcgcaccattcccctcaataagtgtttttaagtccactaggagtagtagagtggtcagcatacggattttggtggaggtgagctaaataagcctagcgaatagggggctcataccctgtctcaggttgggaaatgtcccgcccacggtgatgacgaggtttttgaaacttcgaggtgccataatgttgctcaattgaaaaaaaaggcaatagggccaagtaccaagagtaacaaataggaatagaaaaggtagagattgaagaggaatcaagtacgaggtgccccccaggtgatgtgtatgtcaagggaaagagctaccaggcgggagctaacacaatcgaaaatcaatcaaaaggttgcaagctgggatgaaagtacagaggaagagacagtcaagaaaacatgaagaaacaagtcgtcttttaaataaaaaaaagacgagatgttgtcaaggtttgtggcctgggggatcgggcattaatgaggctgctgcctatgggtgccttggtgctgcctgagctagccaaggcagcacacccctttttgtggagaaggcgaggctgaaaagcactggacgcttaaaggcgcaatctacgcggctaatctctacgtaaactaatttcccagttccggactacccgtacacattggcgttaagggttcttctgctggcgatgattctatgcctagttcgaatactaatgcaaaatatttggtttaagtctagatagcatgtctgattctctgcggaatctaattttatcgagattcttcaagacataaaatttccgatttctactcccaggcgttttctcttagacagaaatgcatatcaacttattgaaaaaaagatcctgatacctctcttcaaacatcaccacttacacctcagtttgcctagtttaatgggcataattggatggatgggacagaactttgacaccgtaacagtccctttcaaaagctatctgacaatccggagagaaggccggcaatgtcatccaactgttgatgactaggatattctgtgagttactgtcccaaagaacctagacatgaacttgtttccccgtaaatataaggcagagatagccagggatgccgtctttgtcgaatcaagatcatactgatcctaggctcatgactgacagatataaaggataggaatgtaagaccatcaaaaattggatattgtattgtgcaagatctctgatggttgaactatgaattgcagggaatcatatatgacaaatgatatgatctagctagatccagaaggctctattccttaggttatgacggcctgcgttctatggtagcctgcatatccaggccaggataggagatagccctaactaattgatattctgggctttttgcactgaacccgacggtataaggcataatacaggacccagctctctaatttttggtgttattgctagaacaatgataatcagctacgaaagtgccagctgaaatgggaataatagcattgagtacggagtggtagttagacatgccgggctaatcacgatacgtaattcggacttgcccttttgggacacgaccgccgctccggtggcgtactgcttgttcccgcccccgagagggaagtgccccgcaacgacctgtcaacaagatgaacgagacatacaacgtataaatcattcaaaatggagctgactttcttgattagtcgcgatggaaaaaatgccaagaggggacatgcacggcgtgcgtgtaactcttgtcgtcacaaaaaggtgtcgcgttctattctagacagccctgcaatagtcggagtcggaggttaacttttctagaaacggtgttatcacaatacctccccggagcaagtagatgatgtgacttgttcacccatcttctctggtctcgcagatagccgacatcctgcacctcaagcttcaaggcgggatcgagcagtccgaaatagatctgcatctccccgatgtgagcgatcaggtgttccctcactccagaatccggtggaacaagaggccgaatccttcattggccctaatgcagatacacctgcagaggccgatcaagaatctcgtcgttttgcgtgtgattcaaaccctatagcgactctcatggaacagaacgagtcaaggttgcagggcggtcgatcccagaaaggagatgtaggtgcatggttgggcaccgatgagagttccattgatcggggcgagacccctgactcttcacaaatattgctagggacccatgttcaccccggctgcctgccttcgaaagactgccaacaggctttgatcgacatatactttcgtcggatacatccattactgcctttacttgatgaggataacgtgcgaagccaacacagagcgggaactctcgctgcgcgactactgcaggtgatgtgtcttgtcgcagcgaaggaccggggtgcggtgcctttcctacgccttggtccggattcaaatcccctcccactggagaaatttagcaacattctgtacactgatgctatgcaaaacatctcgagaaggcctgagaaaaaagtacttgcaatacaaatattggcgcttttgtcactgcacgaatggggctccactggatccgaggattgttctttgaatctggcccaggctatccaccatgcccagaccatggggttgcatttgctgaggccagaccaacattctgatacatcttccaggaatcttttctggtgtctgtggagtctagaccgatggaacgctgctatgaatgggaggcctttaatgatacacgacggagacagaagccatggggtggacgacgttatttcaacgttccgatcgccgtttcgtgtctggcttcgaattgccgataagctgggagaagtgattcacttctaccgaccgatcataaaaagcgtggatcaaagtgaactcgatcttccctcctttgaagaccttgtggagcactgtgaggcctgggacatggctccagacctgcttggtatgaaactttccgtcgtttagttgcaacattgtctaacccctagaccgcagagtccttggagcttgtttatcattctgtgattattctgtcaacacattccagcgggttgcaaggccgatcacagccaagagtgtcaaaaatccgacaaggtcattcaattcttaccatcgcgtcgctaagtttcaatcaggatattcggaatctagtgccgtttcccatgatcggttacaccgtctcgctcgccttttcagtcacgtacaaacaactcagagaaagcaaactgacaagtgcgcgccgcacagccatttcccagatccgtttatttcatcaatttctcaaggaaatgaggactacgtggtggtcggccgctgtgatgactcgtctaggccagcgtgtgttgagcaacattcaacccactgtagaccaggaacgttccacaggcccagaaatcgatatcacccgactaaactctgcacatgaatcgactcatatatctccacggcaacttgcttccactgaggatatgcagtcgcactcggctgccgacatcccgaatgtggggagacggattaatgcaggatctccgagcacacaccctctggccggtcatcaactgggaccggaccaacctttgaatctcgaagtagacagcatgccattcttaacagcaactgaaattgaggatttcgatacttttttcggcaatttccttgatgtcggttttccaaactgctcgaatgatcaattattgctagatctcgacatggcagactttgaatttgctcctcgcggtctagcttgagaagctgcacaaagatgagaaggcagctcggtttcaagtcttgtgtaagtacacattgagtgcgctacttgatagagtcatctgatcatggtactacagaggaaatatcaaactcatgagatgtgaagagaaggctacacactcccgctagaccacatttagtatgttttccgctggccgctgtttctgaccacgccatcgtcataaatactttatctaagaatcccgatagcctagttgtggatagcggccatcggaaaagttacccgaagtagcttagtggggagttttccgctgtatgatagcttcctcgtgaagagatgttcatgtatcaatcactatagtgtatgaaaaccaatcctatgtattcttctagtatctcaaggataaaataacatgatatattacatacttcagaagtagcagtcgtgtgatcatgggaaaatgttccagtatagatcaaggaatgtacccagcatgtcagaaaaagcttctgaggaccaaccttgaaagattttcgcggcttactgtaacataggtatttagacagcattacaagaatgtcggtatttccttccgcggtgaagagctgcgcttgtaggtttgagtccttgaaatcagttcccgaccccgtttaggaatgtccgctccgttgcgcagggacgagtataaagacagacaatgtgccatgatttcccgtgtaaatttgccagacccgattcaattgagttcatattatagcttctgacttattaagctaatattccttggtctttgacgatgttccgcgaacacatcaccagctccgaattgaggtatgattgttcctgttcgcttttccgacatgatctaatgcatattccatagtcttgatcaagcatgcatttttatttcagaacagcggcatccagtgtctgttactggaaaattcaatctctcccttgcacgagtcgtatcggtcaagaatattaaagtgcggttgaggggaacattcgcaatgtgagactctctccacatacttcgtattgactatcttcttacttcgtcatagcccctttgaaggaatcttgggatcagacagccgtgaacagatcacgtttgagcgagagcagcctctagcttcttcgaaaacgctcaaatcattcgaaatgccggcaggagaccacgcatttttattcgatattccgcttcctagcaagatcctcgacacagccactggcgcaaaccatcaatatcacacatattgcgtcgaggccattgtcgagcgacgcctcaaaagcgattttgttgtctcgcagccggttagaatttaccaggtttctaatttggaaacgagctatttacgactacattgtccactggtgagtctattgcatctgatagactttgctacatagatgactgaagatattagactctcgagggccactccagccaaaatatccagtattgcctctccatcactgaccggaacgttccttttggttgcacgttccctgtggaatgctggtttgcaccgctgttgaaatatgccaagctcaacactgtcacaatcaaagtcattgagaaacaaactgcgcggttagaagctactgctgcagactcagtgcgacataacatgcagtttatcactgcagcacaaactcaaactgttctctccaagaccatggatttctctcaaggggatgagtctccggtagacggttcggaaattgaatggcggttcactacaccagtttctctgccgcgaactctcgatgcctgctcgcagagtatctcgactagacatctcaagattacgcacgagctttctatcactgctgagttctgtgatgaggcaggggctgctacagctgtggtatgtaaagaaactcaggcagagatttatgatatacagctaacaaggagttagatcacggaagttatgccatttaagattcatatggcatctaatgtgattggagaagatgcgaccattcatgggcaagatatccaactcatgcagggaagccaaagccctcctccagcttacggcgatcgtctttcggacctgatagtatcggcagcttctcaactaaatctttgtgagcattctataccagcggagacggaatatccgtgttctttgagtgagcacggtgcaagtatccataccatggagcctgctcctcgatacgaagaggtcttatagtctgtttgtttggacttttgtctacttttagtttatgagtttaatgaatctcagaataaatatcggagtcttgagcgcttcactttcacaaccccttctcattctgttaaatactatatccaacctattccgtcgacctcaagtctcactgcatcttgtaaaccaacccctcttcagctcctacttgtccatgacacagtctctcccaccctccctcgataccattaggaccggagacaccactgccaaacacaatctgcattcccggcacgctcaagtgtcgatcatccagccatttctcccactgctcgcctcttgttttgaaataggtttccgggtcgacagactcgagtatcgtgtcttgaacaccagaagtgttgtattgaacctttccaagctccgccatcgccgctctcccagcaattatctcctccatcgagtatactttctgctcattaccaacctgaacaatgacaaccttgcaggattgcaactcggcatgattcttgatcaaagaaagcgtgtctttgagagcatttccctgaccaccaaagtcgacaataacaatcttcgaaggcccgcgactaaccagccactccgcgcactcctcagaaccaacacccccatacccaaccaccttagaaggaacatcagtaggtgaattccgatccgcctcctcgatggacgccacagccgacgtaacctgcaacaagcccagcggcgcggaaccacccagcttccgcgccacgtagtacgagaaaacacgggccgttttcgtcgacgcggcaaggtttactacaaccgcggacgacaattccccgtcggacagggtccagtgcaacccagcctggttccccagtggatggatgggaggttggttcgggttggacgagaaaacgtattcgctaagaacgaacccggctaccccacctatgtacagcgcggtccaggccatgcggtctagctcgtcccgtgcgggatctgggaggttgggtgcgtgcgtcagatcggagatcgggctcgatgtccgagttaccgtgtagcggttgtacagtggcattagttgttggcgatgagcgctggtctcgagccaatggtcttttggtgagccgcgtttgagttctaggtcggttggcgtgctggttgtaggccagaatccgtagaggagggttcctttgggtagttctgggatcgttgtctcttctactgttgcgtaaccccaggctgggacgattccccatgccaaggaatcgttgtatggtgcgggataggactcggatacggggtatgcgtcccacctgccagtaattgatgagaatcttatttcagggcatttctgacagtctcgtctagtctggaagatattcggaacataccaatgcaagaatccacccattagggcgtaggtcaaattgtttgaagtgaggctgatcagctgcgtgcgaattcttactgaagaatccgatagttccttctgagtagtggcttcgaggttgaagctcgcatgctggcggttatccagctttgaaaccacatgaacgcccatggtgagtttggtcgtgaggaaattgcggatgagaatgagttagttctgtaagctactcgattactgaacagattcatgaagattatccgggaggagcctcgccagattccttgattcttttaaactgaatggattactgatcagagtcatagagatcatccggcggggaacccccaccagctgggacggcgagagtcagcccgattatgcactgttgtgcatgacagatatatctttgaatgatattctattgctttattggtttatattgagatctgtcatcgaattaatcacgtaactattcaaattcaactatgtaatcaatcgtgagatccgttaactatatattccttgttccttttcggactaacaaacatctctacatacacgaatgagtccgcctttactgacacaaatcgataagagtaagatacaaagcactaaataaacacaaaaaccttgagcaaaagcgagacaatttaagctcagttctatggaaccatagagatcccagaatacgataaagaagttacagatatgcccagtagaatgataaattagcagaatagattttccaaagccgccgagagcaaagaattaggaaaccaacgaagatgagtgttagtgcaaggaatgaatgcagaatgaaaccgccgcatagatagatgatcagatgagaaatgagatgacagatgcagaatagatacgaaaggagagtggtataaacaggctcgagatatcagctcgatactcgggaaaggcgaagatttgaataatggaatgtgagatcgcttgtaaaatgacagggttcatgctcgcgctttgcttggcgcgggtgtatgcagagatggtgatgtgatagggattatgtatgtattttcgttcgtagactgttctcgtgaggtttcaggctagtattgtaatgccgagggttcaaggtaaccaggattggggttgggtgcttggaagggtgcgatttatttgggttgagattagaaaatgacgaatcgtttctgtttggcaggcttgtcgatttcatcttcagtttctaaataattcagttagcaaaatgtgtatacaactcggttggtttactcaccctggacatgacttgtggcctgagccttgcgctcggctttcttaagccgggctgtgctgcgcgtcgctgcattgcgcgcagcagctggatgtttgccctcggccgcagcccgaattgtagcaatccgatgcttggcccgctcatcgccctgatctgcggctttgacataccacacattcgactggagaggatcacgccggcagccaatgcccatttcggtaaagtagccgacagcatactcagccttcgcgaggccgagattcgcagcgcggagagcccactcatacgcctcgttgtcatccttctcgagcacaggctccgcgccaacgagataccacgcacaaagcgccatcatagccagcggatgtccgttctgcgcagcattggtgtagaaatggatactgagcgccgggtcgcgtggacaatttaattttccgtgctcatacgcatccccaagccgatagcaagcttcgacgtggcccagctcggcagatttagtgaatagttgcgctgcataagtggcatcagggaagacatcatctccgaagcctctttcgtgcatcacaccgagctcgtacgggccagagttatactgtgcatctgcagactcggtcgcgcgtttcatccatttcacgccctcgcggtaccgcttgcctagccccatatcgccagcaatacaggcgttggccatgcggatcatggcacccgggtggtttttcgacgctgcctggcggtagaactgtactgcgcggctgccgtcgacgcgacacccccagccgaactcgtagcttaacgctgtgcggtagcaggcttcgacgtggccgtgtttgctagctgcgaggaagagcgggaaggcccggtcgtagtcctcgacgcctttgctgaagaggcccgacgcgtatccgtcgccgagatagtactgtgcgaaggggaagctgcggtctgcgaggcgctggaggatggattttgattctcggagtagacgggcgcgcgttatcgggctggagtcttcgacgtccacgggcggcatctcgcgcatcgagttcaccatgaacacggcgaattcgtacagcactgttggctcgtcggttttcttgacattcgccaggtacatctcgaatgtctctttgtggctaaggagggaggcgttgtttccgactgaggcttggagacgcgagttgtcgaattgcgtggttgggcctggctgcgggtatgatgtgttgagcaaattgaggaatgatagagacctggtttccggggttcctgacgaggagcgcgcatttagatacggggatgcggagaggttacgtcggtgacgcccatcggaggttgaggagtatgccgaaacgggccgcgacagccttgttcgcctcacggccagcttatccgtcgaggcagacgggttatctccattgggtgcaggtttcctggtaactgccgcggccggttgctggtgatggtaggccagaggttcatagttgtcctccactagcggcacgctatccaagctttcccgcgaggagccgttatggctttgacccgcgcgctctaacgaggggcggctctttttatttccgtgtccgtcatccttcggatctatcaccgaccacgagccgctgctcgctggggtatgaccgtacgaattcgaatgtgtgtagtgggcctgtgatgagtctcgccgctggggatgggcaggattccaggtgtgctgaggcggctgtacggggtcgtcaagtgacaggtctgtgaactcagggaggtccaattgcggcgtggtgggcccactgtatgcgccttcgatgcgcacgctcgaggcatcgggaatatctgcgctatgtgcgattttgaccggcgagcgcggagagtgttgaatgacaagggaggtttccgatcgcgatgcttggtgggctggtttgctcaggttcaacttctggggtcggttcgggatagtccgtggtgtttcggacggggtgaatgacggtgatgatcggaggtaggctggtgggggagaaggcaatgcctggcggtgtcccggggcaggactggccatggtggagttgggaatatcaaagggcgaaagcgagcggaatttcaagatccatgaaaagcgcgaacaggtggactttatggggaatccgagctgtggagaacgagtggacacgaccactattgatatttctcatcgaagcgagcaaaagaaaagaacggtctctttcaaatcgtcattctttcttttcttttaatttatgtttcatgcgcctaatacgggtggggatgaactattattatgtctctcatgccctcgtctaacctaaataccatcagttgatgcctatcggatctgtaaatagggctttccgagacattcatcagccgcgccggtctaacagcgcataagacatgccttcaggtcaaatcccctctttcactgtggagacaacatgtgctgcttcacgtctttagttcgcctttagttctctttagtctctctttagtctttccttagtgtcttggtagctcagtagtgtctttagtgtccgacctttccggttgtgcgtggcagatgtggatggaaagtggaagtacactatatatccgtcctggaggtcagctttaatatctactccggactccgtgactcctatttgaaacagaggcttgagcgtaaatggcgaatatattgcccctttcgagtccttctctaacatgtgagaaacaaactaatcaattgagtttatccaatccatctccatgtatactccttgcagcagtcaaccacaccgtcaaagcacggacgaaaagcaaatctcatctttagatgacgacatttcctacgcggtgagttcattctgcttaacttgataccggcatccctcgcagtaagtactagatattcggtatttggagttgaagctctgtgctacctctggagacatactgtcggcattctagcaagagccaaagaacgtggccggacaaggataccggactccacagtcaagatccccagcaaatccgacgccaagttggtttctcaatgggggttatttcgaattgaaagggagtaattgcctgtggacatgatacattcctttcttcttcgttcaagatggtcgatcgaaaagatatggccttcgagttcgaaacggcttgatgcatatgcactagttatggggccatgggctggacggattctgggggttgccgtgatgatcggcggcctgttgtcgatcactggttggattggcattaccccgtacaggattatcctgagcttttatatcgaaaccatattgattttgacttgtttcaagagcaatatggaaagaactaacgcgttctgctgaccagaatccagcctggtggtacaaatattggtgttttgtcaagggttcgcacatatggcatgcattacctttcgattagtattctctgaagcttggatctgaatcacaccgactcaaacacaatatgtgagctcggtcttatctagatgtatcacaaagcaggttgccagttttcacaaggcgtgtcggactattaactatctagaatcggagtccgtgtaacagtggcaatatctaactagtcggcgtggcagttataactaaacatcaacagtctaagcccaaaatagaaacaaggaccccgtgatcagaaggaaaatggttgttcctcggctgttgtttccatttgatgaatttattaattatgaaccttgggcgacatctggctaaccgtggaaacgagagagtttaatttatctccgcggccagctgggcaggtgattggggtattgcccctagcgacaaggaaattatttatttttatttttatttcttaatatggcaaaacaagcctaacctccccaggtcaagcgcagagggagtcccgtgtacggactactccgtacagggtctttgtctcagaacttcccttttcccttagacacaattgctattactatttctactgctgcattcgctcgtctctgtgttttggaccctttcgttttcttgcgtagtggggactttgttattctccacccgttgcacaggccgaccgtaccactttcgctgagaagtctcaactctagttgctggtcaatagagatatcgaaaactgaaagaaatctaagattcgtacggaaagacgaatcctatagctcacattgtcgaggaccgggtctgcgcatttgacatgtttcagtcggcaagcgacatattgtgaacagtcttatccacacattcgctgttgatcagcggaaaataaccgaagtgagtaggccagtaagttcaatccaactaacaactggggtctgattggctgacatcgggaatcttaggagatgtctttgccgcagcggccagggagaccctcgcctcggcgtgaagaagcccgcgcatttcgcgaaccatcccagcgccgtcgacgggatatcgactcgggaacttacagcgacgacccgacttcccactcccatcggcatcgccgccgacattccagccatcggagagcaatggacacggacgaagaacgcatggaccggagcggggatgtgagacacaaaaagcgcatggtcaaaccagagcgcaggaaagacgaccgtgaccaacccaactatcactaccgtcagcgatcaaatcacatgcgtatttttccctcgacgacgggaaacgatccgttattggataagagagatgaggtggagacgaacagctcgcgcagcatggacatgaagagcaagggtctttacgcgcggggtaatatcaacaaacccatggagcgtgtccctagcagacatcgctcgaagaagaagaagagaggctcgcgaaggtcaaggggcgttgcggaggaaaagagacgtgaaaaggcaattgagcagagtggtccgcccgagttatggcctacatattgtgtagttctcacattcttcatcccggactttttgctgaaatgctgtggaatgccacagaaagagcagcgcactgcttggcgggagaagatcggccttatcagcatcattatgatgatcggtgcttttgtcggtttcctgactttcggtttcacggctacagtttgtgcctcgcccccggttcgattgaaggtcaacgaagtcagttccaactacatgatcttccatggaaaggcatatgacttgtccggttcgaaacaccccgctgtcactggtatctctgccaatgcgaatgttctctacgacttaccacacaagtatggcggacaagatggcagcttcttcttccaacaggtcaacggtgcgtgcaagggactgattactgccacgtctgatagcgatattccaacaaactccgatggagatctcggttggtacttcccttgtgcgcccttcaaccaggatggttcgtccgaaccgaatacgactgttgaatattatgtgggctgggcttgtcataccagcaaggcggcccgcgagcctttctataccctgcacagtgaaggggatgtgtactacacctgggaggatacaaagaacaagagtcgaaatctggccatatactccggaaatgtactcgacctcgatcttctcgcctggtttgacactagccaggtgtcctatcccaaacaattcgacgagctccgcaagaatcctgatgtccgcggtgttgatctgacttactacctgcaaagcggggaggagaagaagatcggcaagtgcttggcgcagatcatcaaagtcggcagtatcgacactgatactgttggctgtatcgcgtcaaaagtggtgctatacgtatccctgatcttcattctctccatcgtgggtgtcaaattcgccttcgccctgctcttccagtggttcctggcacccaggtttgccgcgcagaccacgagtatggcctccgacgctaggactcgcaatcagcagatcgaagactggtccaacgacatatatcgacccgctccacgaatgaccgaacccaccattcccgatcgcctcagcaaacgcgccagcttcctcccgaccacttctcgtttctccagcccgtataatgtgaacagcagcgctgggagcaagcaaaagccgttgtatgtcacgatggctagccagaactcgacgtctcggctcatgcccagctccaatcctggcactatgtataagctgagccacagcgggagcgggggcactctgagcgctgacaattcccggcataatcctggtgccagtcggactagcttggttccgaccggccagggtcaacaagatacgggttatgccacgctatcgacggattacgagggcttaggtcctgctggttacattcacgaggctgttgttccgcaacctccgcctgaatggcagccattcggctaccctctagcccacagtctttgtctgattacttgctactctgagggtgaagagggtattcggtcgactttagattctattgccatgaccgactacccgaacagtcacaaaacgatcttggtcatttgtgatggtatcattaaaggtaagggagaatcgttttccacgccagacattgtgctaggcatgctcagggagcctgttgttcccgaggacgaggtcgagccctactcctacgtggctgtggctactggctccaagcgacacaacatggccaaggtctacactgggttctacgactacggccataattcgatcatcccggcggataagcagcagcgcgttcccatgatggtgattgtcaagtgcggaactcctcaagagtcgacccagtcaaagcccggtaaccgtggcaagcgagacagtcagatcattctcatgtctttcctccagaaggttatgttcgacgagcgcatgacggaactagagtacgagatgttcaatggcctgtggaacgtcacaggcattgccccagacttctacgaggttgttctcatggtcgacgccgatacaaaggtgttcccagacagtttgacccacatggtctcggccatggtcaaggacccagaaatcatgggtctctgtggagaaactaagatcgccaacaagactgacagctgggtaacaatgatccaggtcttcgagtaagtctccactgtccattagcagcgcagtaactaattcaaaacaggtactttatctcccatcaccaagcgaaatcattcgaatccgtgttcggtggtgtaacctgtctccctggatgtttcaccatgtaccgaatcaaagcccccaagggcggccagaactactgggtgcccattctcgccaacccagatatcgttgaacactactcggaaaacgtcgtggatactctacacaagaagaacctgctccttctcggtgaagatcgctacctgaccaccctgatgctcaagaccttcccgaaacgcaagcagatcttcgtcccacaagccgtctgcaaaacagtcgtgccggacgcattcctcgtcctactctcccagcgccgtcgctggatcaacagtaccgtccacaacctatttgaactcgtccttgtgcgcgacctgtgcggaaccttctgcttcagcatgcaattcgtcatcttcatcgagcttatcggaaccctggttctgcccgctgctatctccttcaccgtctatgtcgtcgtcgtctccatcgtcaagaaacccgtccaggtcattccgctggttctgctcgctctggtcttgggtctgccgggtgtgttgatcgtggtcactgcacacagactggtctatgtgctctggatgctgatctacctcctctcgcttccgatctggaacttcgttctgcccatgtatgcgttctggaagttcgacgatttcagttggggtgatacccgtaagactgcgggcgagaaggataagggacacggcgatgccgagggcgagtttgatagtacgaagatcacgatgaagaggtggcgcgatttcgaaaaaggtatgtcttaggttgccctggaatgatttgtcgattctaatattctcgatagatcgtcgtctacgaagtgcctggtcacagccccctacaacggatgttcatccatcgcagtacgagccttattcacattactaacgaaagcgtcagcgcttcatttcttatttgctttttcttgcttcccctgatgcacgtgatctattgtactatttacatatcggcgttcaaacattcttataatatagttcagagcgttacacgactgacgattgattatttacatatttttggctttcttctgtttcaagcatttgctgtcttgtacggcgaattggactgggcgcgttgtatgttaggaaataatcgtcatcctactggccatagcgtaaccaaaatagcatcatgaaccctgtcaaccaacatgaactatcaaatacgtacttctaccacggcttcccacagatcacgtcagcccaagtcgtgcccaacagcatccaagcgtgagtcaccgggctgtccgggttggatgtgcatgttacgtgctccctgcattattctaatattgacacatgcgagaatatatgatcaagacgatgcactttaaattagtttacgtgcttaatgcttaacccatgtcggatcagctctatgatcgagcgaggtctagaatggacgggacaacagttgactgaatattaggaccgaatccttgcatattctcgcgatgtatcatcttttgccattcgtttctttttttgccttccatgtatatattcgccccgagctcgcacgtttctctccccacgttccatctgactgcatgggagtgtcagaattaatacgaatccccttcttccccttatttgaacggaaaagcctaccgcgcactgtcctgttttccccctctatttttcttgggatcagcccacatctcgcactagaatagcagccgctataagattgccccgttgatctcgtcttccttttcccgctccttactctgcccctcttcggttgccctcggcgttttctcgctttccgctctccgctctccgccttttccctgacttggattccaacgccacgcctgcagtgtggggttgaactctagtcgagatcgctgcacgagaggacagatctggtaaatcctggaaaccgagacactgggtttctggttactggatttttttcctccgctcgtgcgaccgctattatcagtttcgggtcggatgtccatggcgggcgatgcttcatcccgacaactgtaactctacgaatcgtccctccgactcatctgcccgctcgcgagatcccgctgcaccgccgcgtcatgtgttatatcctccagttcaaccccgagctatgaatcctctacatcgttccggtactggactgtctggtcgagaagaccacgcgacggcctggaattcgcctgatttcaatatacttcctaccgatcgatctgccccgcctgcgaatatgacctccgagatcgatcgccgcttccatgacgtgggtgtcgcagctctggctgctgtgtctcagtacccgcgtgccctggatactgcgctcggggattcttttctcgtgtcggaagtcgtcaacgctatcacgagtgcgggcagtcctcccgatcatcgacatttagatcccgtgggtcctatgccggtacaatggggtaattttcaacctaccccttcggctggaccggtgtttgtcttcggcgcgaacccgagtggtaacacgggtatggacacatccgttcgggacttgattaaccgcaccgccggcgggcagaatatcgccatcgccccggacagtgacatcggggatggtcagaaggatatggttatggattatcagtccgctaccatggaagacaagccatcgcccgcagcaacatccgatgatgagctggaagactttctccagttttatcccgatgaagaggagtattactacgagcgcatggaccggccgacgcacgaaccccaaatgccagactgcaatttggatgacttttataacagtatcagttatgaagatatcgaggtggatcacccaaacgtacctatggggaactacaccgacggtcagatggatttcgctggacctcaccccgcatctataatccacacgtcaagtaagacccaatgactgttgatacaggcctagctaattctctctagcatacgagcggaacctcactattgatgaattcatccagcgctggatggtctcgataaacgtcatcccccatgggttccattctgaaagtcgaattccaccgcagcttcgcccactctccaagatgatcagctggaagccgccgccggagattgttcggccgtctggatggagacgcgatttttacgatttgcagcagatcccgtggacagaaaccttgcgggtgacacggttcgatgcacgagctgtgcgtgacgcctggtatacttcgtatcataacttggattactcgcaccgtggatatgcaaatcgccttccccagcacgaaacctttttccgcgggaactctatgcacacttcacacaaagcgtctattgaacacttccagcttcgcaatctgatgtcggcccctgcatctaataccgtccatttcgcttccagctcaaaggtgttttcgtggaccccaaaaaccggcgacgcacgctgtataatcgacctgagccagcccgaccccgacttaggcttcctcagcccagtcaaaatatccaccatgaaaacagcgcacggcctgacaatcgccggcgggttctgcggggaatacgccctacgcagcaccagcggatccgaccctggcataaagggcctcgtaacccccgacttcaacgacggcatcaccaaccacatcgatataatccctagccgcaccggcccctccccgaccgccgtcttcgcctccaacgacaaacacctccgtatcctcgacaccgaaacaaacattttcacctccgaccaagaactctcccaaccaataaactgcaccgcaacatcccccgacggccgtctgcgcgtcgtaatcggcgactcaccggacgcatgggtcatcgaatccgacaccggccgacccgtgcaccccctccgcggccaccgcgacttcggcttcgcctgcgcctggtccccagacatgcgccacatagccacctccaaccaagacaaaaccgtcatcatctgggacgcgcgcacctggcgtccgctcgaaaccatcgactcggacgtcgcaggctaccgctcgctacgcttctcgcccgtcggcggcggcccgcgcaccctgctctgcaccgagcctgcggatcgcatctccatcgtcgatgcgcagctcttccgctcaagacaggtgcatgatttcttcggcgagattgggggtgcggactatgcgcctgacggcgccgagatatgggttgctaataccgatcgccatttcggtggtttcatgcagtatgagcgcaggatgtgggggcagcgggttgggttgacggatttgccgtgtgagtgggttaccgaggaggagttggcggtggatcctaggtgtgttttgagtaggagggagcgggggttgaggtttttgaggactttatcggatgaggagcatgatgcgttgattctttgattctcttatgactgttatgttgtctttttctttctttcttttttgggtggtattctttgcgccttttatctgcatctgataccctgggttgcggtgttggaggctatctatatttatttctttttttttttcttagagtattgtggctcataataatagttgtaactagtcgtcgcatacgttttatacttgctggtcacatgacatcacatctcggcgtatttattctccgattactaagcctcaaatatccactgcattggatacgtggacatcgccgtgtagagccaagaggaacgatactttggcaatttattttctgattgaattcattcaagttatcacttcctctgctataccactactcttctgtcagcttcatctctatcatctctatatcgtagttcctccatgtaaactccggactagaacacactgaaatcaccagatcaccagatcttccaagaaaaaacaacccaactcgatagtcaacgtctgaaacatccaataaaaagcccgctctggtaattggccacctcagcttcgatccacctgcaatgcgatctcacagcgaatcacccaaatcggcgcgatcaacaaaaaaactgccccgcaacccctcctccagcctcagctgaagctcttccattccattcttttcctctagctttctattaaatccatagcatatctccatttccacctttttcttgaacaattctatcatattcactcacatcctccattttaatccaaaatgtcttaccgcgataacaaccagcaatacggcggcggcggcggcagcggtggcggcgccagcgacagctactacaacaagaacgaggacttctccggcggtaacagcaataacaataacaactcctacggcggatctggcggtggcggtggctacggcaactcctctaacgagggccgcccttacgagggtcgcaacgagggccgcaacgacagctacggcaaccagaaccaaggccagggtaactacggcggtcgccaggagtcccacggtggcggaggctacggtggctccagcggtggctacggcgataacaacaactcctcctctggctacggcaactccagccacggcaactcttcctccggctacaaccaaaaccaagaccaaggcagctacggcggctccagcggcggctacggcgacaacaacaactcctcctccaaccagcactcttccagccacaacgaccaaggcagcagcagcgaagaaagctccctgttcagcaccgctttgaaattcctcaaagaccgcaataccagcggcgacgtcgacgagcagaaggtcgccaatgcccaccaggccatgtacggctccggcagctcgtcgaaccagcagcacgattccagcactgttggtgcgggcgctgcggtgcaggctttgaagatgttcgctggctccggcagtgggggcggcagtgatggcggcttggataagaataagcttattcagcttgctatgtctcaggctgggaagttgtgggatgaaaagagtggttcggggggttctggtggtggtgtggtatgttattcttgtgcttcttttggttgggttattgctaatggtgttacagtccggtgataagcagtctgctgtcaactctgctgccgagatggctcttaaaatgtatatgaagaaccagggtggctctggtggttctggtgctagcgggcttatgagtcttgcgagcaagttcttgtagatgtttcttcttgttgaatgtgttggatgatgtctggcatttgagatatatcttttcattctagcttacgccgcttttgaacaaacaatcttgggattagccaaaagaagataacagtatcccatatgagaaagcgtatctgtctagcgttcctggttacttgggacgtattacttgactgggggactgttggcgtcttcggaacaactgttagggttgcagagcctatgtatactcaagcattctctaacctttactcccaccgttttatatcaaccacttcatttgcaataatactgcatacctctcaattcgctcagtcatattctaaatataactccatctgtctcggccaacggtgccggcgacaaagctttatgccaagccactgatataccgcaacaagtaccctatcaacccagttgtcgatcctcttagacgagtaaagatcgtccgattaaatctcgtattcttaattaatcacttacagagtactccctagtgcattcacactatagtgttaataacccctggttgatattcggcaattcaattctcgagattgaaaacggtatataccagaataggggtgtccactatttctcttagtttatctatgaagataccttatgaaatacccaataaccactaatggcattggcattggcattggcattggctaagtaatcttccaggggccaagttatgcattgagcttatccccagttttcatgacataccccactcccgtcctaaccgtcaacgtagattcttcagcgacatgtagatcaattccaatatagaatttcgacgatgcatttatcgctagcgcgctatagacacggcatatattcttgagtgtccaagccgagcgaggggtcaagtatccgtgctatcacaactatgcaggaaaaagcctgcacaattcaaaatgaacagatgaggtcgtactagatcatcaaggaatttgttatatatactattccaattattttctgccttcctgtcattctagtatgtttcttttgtccaattaggcatcttcttaattcaaaatgctccttcaatcggcttcaagtttgattcaggaacactatatctccgtcatcgccacttcggtacgtttactacaactttattcaattgagccagtctaacatgctctgcttagattctactatcattagtctcgcatgcatactaccaaatcttcctcaaccctctcagcaaataccctggccccagactcgccgccacatcacgcatacctcaaatctaccataccctaaaaggcgacctcctcgaatgggtcaccggactacacaacacccacggcaacgtcgtccgcgtcgccccagatgaactaagctacgcaaccggcgacgcctggaagggaatctacgggcacgcctcagccgggaaaccagtaacagagaaagacacccgcttctacggcccatccttcaacggtgctgcagatatcatccgcggaaaaggccccgaccactcgcgtttccgacgcaacttctcccacgccttttcggaccgcgcgctgcgggaacagcaggctttgatttgtggatatgcggacgcgttgatcgacaccctccacaactcgatccgggaggatcccgcagcgaaaataaatatggtccgcatgttgaatctgacgacgtttgatatcatgggcgatttaacattcggtgactcgttgaatctgctggctgggactgggaattgcagttgggtgtcggctgtgttcgtcagtatcaagacgaactctctgcgcagactggcgcgctacgccccttggacggcggtcattgtccagcggcttatcccgaaggaactgaagcagcagagtatcgaacattacgaggcttctcaggaacgtgtggacagaaggatcgatggcaactatgtgcataaacctgatatctggggtattgtcatgagccagaaggaggacctccggcttagtcgggtggagatgtatgccaattcgcaggttttcatggtggcgggtactgagacgactgcgactgcgctgagtggtttgctctatcacctcctgaggacgccggagaagatggagattattgtagaggaagttcgtgcgacttttgagaaagactctgatattgatatgagatctctggagcatatgacatatctcaatgcgtgcattgaggaagggttgcgcatgtaccctccagttccggttggtctgccacgcattgctcctgatgagggattgcttgtttgcggagaacatattccaggaaaggtattcattccgttgtgttttcgaaggttggttctaatcttggatgatcatagactgcactttcggttcatcattgggctacctaccacagtgctcaaaacttcagattgccaaatcagtttatccctgagcgctggattggggatgagttcgccagtgataacaaggctgcatttcagccattctcatttgggcctcggaactgcattgggaagaagtatgttttcgtcttgctctcgaatggtcctagctaatgatcgatagtctggcataccatgaaatgcgtctcattctggccaaggtgctgtttaattttgacctttctcttctgccggagtctgttggttgggacaaacagaaaactttcttcctgtgggagaagaacgatctgatggttcagctgaaggcgaggaaataagggcgatgtttgaaagaacttcgaatcttctattcagcattcacacattataggcatttcgaacaaattcgtagtttcagatggtcaaacccatctctaatgtactacaatttcaaggtaaagttaatatgaaaatcccgcataacagtgcatgcagttagccatatcactttgtcaagtacaataaatattgatacattttcgcgatgatcatatctgttccctgttttctatggaaacacgataacatgtcgaaatttggctgtgctgtccatgacaccgttgtatgcctgcgtgaattcgtccatcgtgaatacttttatcatcgccttcacattattggtggcagagtactcgatgcatttctccatgtctggtgcacagccgcaagcgaagccacgtagggtagcacggttcatgttgaggaggagattatcgacttggattggaccatccgtagcggcagagaccaaagtgatcgtccctagagaggatgtcagccaacggcaccacatcgcgaatggtaaatggaatggaggcttaccattcttcgtaacagccggtataatagcattgatggccttggaataaggcgcagtgcataggatgagattcgcaccaccaagagacgacatgtactcgacaacgtcgattttactcgagtcaatgtattcgcaggcccccaaggacaatgcgagatcccgtttagaagaacccgacgaaacagcatacacctagaagaaaagaccagtcagctatgctatagcaaataagatatcctctcctttacctttaatcctagtctgttcgcatactgaatcgcaaggtggcctagtcctcctactccctggacgaggcagatgtcgcccggagaccacttcgacgtgtttatggcatcaaatacagtcgccccggcacagcagagaggagcgagttcagcataggatgctgtcttcagcacatcctcggcaatgtcgatgatagccgtgtaaggagcgtacatatactccccatgaccaccatctatcgtaaacccagtgtaatccacgttgcggcaggtccaaaactgtcctttccggcagtaatcgcactgattgcagtagccgccattccaaccaacgccgaccaaggcacctatggcgaaacgctccttgttcaccgggctttgtagtagctccgagcccacgccggcgatacggccgatgatctcatggcccgggatgcgcgggtactgaaggccaggccaggcgccatccttgacgaagtggtcggagttgcagatcccagacgcgtgcacgcgcacgagtacctctgtcggtgcgggatcacgcagctctaacgtaatgacgtcccaggtactctgaggtgcggcacattggactacagaatacgtgtcagaatgaaccaatgaatgcaaacataatgacaaaaacacgtacttgctctgtaggtcttggggggtgaagaagccattgttagttagggttaaataatgaattacgaacgaagcgtcgttgtagaatatagattgggtagagttcttcaattgaaaatggtggatatccctattttatagaaaagtttactattgcaaggagagaccatgaacagcacagaagaaatccgaatacaaagatatctccgagaaaaggcttttgttgtacggacgtaagcataactccggatcccgattacgaagacccatagcgctcagggttcaaaaccccctttagaggggattcggccggaggaaaacatggcatgttaccactaattagggcaaaaaggtgcatacaccttagcaaggataaccggtgtggaagcagcggacagttcatccaacctgtttattgatccaaccgatgaagataagataggctatcggtcacgtgactttgtcgggccacatcgtctcggaagttccgacagattcttgaggcctgaatgcctgaattagcaccgctctccacaccgctctggacaagttcaaaaaaatgaagccttcgggcctaaacaaatcccgtgacaatcacccgatttgatcaattagatcctttctagcatctaacattgaattgccgttttcagaatcaaactatgtatattactggtgatagtagaattaatttaacttgcttcggattatgtgatctctgaatagcttcatctgctaacatggagatacccggccgacagctgatcgaatgttgaaatgggaccgctaatttagctttaaggaaaatatattaatccgtgttaatccgcgtttcgaccatctatctgctccgagcggtcttggcgaaatatcggtggatgttgatagaataatgatattgtatgattttgattcgcgaaacggtatatattgaactgactctacaaaatgtaacgacaagggtagaaaaaaacaatgactcgctgacctgtacatgcacatgccacgggcccaacaaacaaaaataaaaggtcaacgctaagcgcagaaatgtccaacaccgcgaccgaccataaacaattactgctcactctaccactcatcgtcgtcgtcgtgtttgccctgcatcgcactttgtcgtgcccgcagtgcctcggccaaaccacctgccaggctgacgttcgatgcgctgttgggcgtgccgcggccgctggcgcccgatgagtcgtttgactgcatgctcacggcgctatcgcgcgcagtgggcgcgcctgcgggtttgcgcccggccatgttgggacgcttggccgggggagcaggagggtgaggcttgctctttgcagctgctgcagctccagcgccatttggaacagggctgggggtggcgcggggtgccatcggaggtgggggtggaacgggcttcggtgtgggagcgacggctacttcttcgaggtaggattcgggggtccatccttgctccgatgttgttgtgttcttgcacagccaccatcctagaacatgttagtatgattcaaatgaagtatgctatgggtacgtaccatttccttccttggacacaacctccacaatttcgcccttggtgatggaaagctcattggcccggtcgctgttgtagtcgtacttgacctttgcggcaggctttcttgacgctggagggggtgccgcagggggaggcggaggagccctcatggagccagaagatctcactgagctacgcgactcgttccgagagtgcatggcggcggcagcagctgccatagactggggcacgatgcgcggctgaggctgagctgcagcttgcggtaccatggcaggctgtggggtagaccggggcagaggctgagcggcagggacaggtctgcgagcagcttgagacaatttcgaagggccgccaccggggccaccaggacgaagtagcttgcccgttgtgaccgggcgagcagcaaccgccttcggccgcggagtaggtttggagacagagctaggaggctcaccagcactagtgtggattgtgctgcttttgtagctgtccacgtttccggcacccggatctttgactgccttgacggttgccagcttgccaggcttcttatggtattcgatggtttctccaatcttcaaggtcagagagccacgcaggacattggtgagatgagtgaagaactcggttttgaagacacagtggattagcgggtcgggttcctgagctccaataaccagcgaaaaccagtcatccttgagattcgaggtgctgacactcttgatcgctccaaccggaacggttcgttccgctgaaatgacaagctggttgttttcgatactttgtgcaacaacgaaaacgtgacgattcgtcaagaccaggatccgcggaacaggtttgctagaacgaccaaacttagacaccaaaacctcggcacggcaagagaaaacaacatcatctgaaccgctgatgcctgcaccattgcggatcatttcaccaggaccaccggtattgccgacaccaaggtaatcacccaggaagcgacgagagccgagaagactcattctccgacgttccttgcgaccctggagcactttgtgtccctggtcacgaatcttgatgaattcgagtccgccggtcatgcggcgccagaagcgctggatacggatcgcacattcaatacggtaccggagatagtttctccacgcacgttgaatgcggatggccatattgtgccagtatttgtctcgcatggcttctagtgcgaatagtgtctcgggagtcttgacgaaaacctttgtgatacccatctgatactcctcggcagggatgcgggtatccgtcaagatttgcttcgcgccggattccacgtcaccagtccatgtgtagtcaccggcataggaagtcttcggggacaacaggtagaatcgctcagtgaacttgtcgaaggtctgacggtaggcgaaaccagcacgtcgaatgcggacgttttcctggagacccaggtacttgatctggtgcaggacattgccgacgttgaattccttgggggccttgttatcgttgggtttgatggtacgaatgtaagatggctgcgccttcatgagcgtggccacaaggtcattcgcggatgccttgatcttgtcaccggcggtaggtgggcgacgcttgtcatcttggttgacctcgttggggaacagcgcgtggacgaattcgttgctgctagattgggcaaggttcaacaagtccttcaacagctgatccttgttcttatctgtcattccctccacggcgtaactgacatcaccagcgtagtgcttgatgatgaactgcccctggcgagcttcaaagttggggttctgggccaggaagttgagtctgccaacgaaagtctgatcggccgcaccggaatcggcgtgggcagttgcgcaggcatcattcaaagcggcgaaaacaccaggagggcgcttgtcctcgatcaacgagcacaccaccttgttgtcaaagtactcgataggagtccacttgatctgctcgcgggcatactcatcttgttctgccttgagagtcaattgaatgaaaatctgctgcagtttttcgttgacatagttgatacacagctgctcgaaagagttcttctcgaagatttcgaatccgtaaatatccaggataccaatcgaattagtgatggagcctcgagcagtcagtgactgattgacgcgctctacaatccaatcgaacagattgaagtaaattcccttggccaaagcgtcgcgaacggctgaagcttggaccctgttcagcggcacttcgtacacagaacccctgcgccctcctcgggcagtctccatcagacgaatagtcaacgctttgtttacttgagcagcatccacctccagcaggtaggcgacaaagtcaacgattgactgatcgctaatagcagcgttgccagagtcatcctcggtgaactgaacatttccaatccagagaatagccgctagcatgcggaacacattgtcctgctcggcatcgctcattccaatcacccgcatcgcatccagtgtatccttgaactcggcaacatcgtcgattccgggcacatcataacacttggaacggctcgtatagaggtaagattgtggttgctggagaccgaagctgtcacggtacttttgtggggccccctttgtgagttggtaaaagatgtggaaattgcgctcattcacaatttgtcccacaactcgcgacttttccagcagataatttgtaatgttggctcccaccggctcaccgttggcattgaactccaattctaggtattttccgaatcgggacgagttattgttgcgcagcgtcttcgcattaccgaatgactccagcaacgggttcgtcgccaaaaccatttccttggtctgttgaatagacgaatcgccgccgccggagacactggcaatgtattgcatgatccgcttcgcggcctcggtctttccggcacccgactctccagaaatgatgacacactggttgtccttgtaagacttcatgttgtagtatgcggactcggcgactccgaatacatggggagggacttcgagacggttcttgccgcgatacgaatcgaggacactatctgtgtagatacccactgtagtcgcaagtccgttagcaaggaggaaaccgaattctctcggcggagcaactcacagtcccggaaaggatttactgagaccagcacatggccaatataagtctggaagtctcctgtcagcctgtattcgtgttcgcgcacaaccccgcagcccgcgtgcaagagcgatcccttacataaatctcgtcatgctcgaaccggagcttcagattatcgttgatggcctcattggagatcttgctgagcagcgtgagatctgacacgccgatctccttcttcttgctgctctcgaaggcggccttcctgaccttcggctttccccccgcttgccggccatcgccaacatctgcggctgctttggagcgcccgaagcggctcttcttctctccgccaacggggcgtcgtgactgaccctaaaccgcaatcccagggtcagtttggtccttatctggtcgttgcgcaagtaggccacctaccatcttgtgtcaacctctcggggatctcgcgcccaggcgacaatgtgcaaatctaagtcaagcaaatgggggaattctagtgacaagttgagattgaggaattgagagtgaatggaaacagtctagaaccaattcaaggtaattgtaagagggaagtgcccactcggcggacttacgtacaactggtcaaaccgaagcaaacagctgcgccacaaaggaccctttttctggttccgtcgctgcctcaggggcgaattgggtatcaatttagccgcctgcccttagaatgatctttttgatactattcttattgatctattgaatttttgtcgatactcctttttcttgaacctccttggccagccactcacgtcagggcatgtggctaatgttaagaataggtgcacgacgtcattgggcatatatactgcctaaccaatttcgattgatatgcccagaccagatgaattggagccatgaaattatatatgggtctactcgatttgcatgtaatttcacttatcgttcttaactatgtagcttcgagtctgagagaccgccttgctggttgccgaggcatggtaacggtgtcggtatctatcttgacgcctgtaacacatcttttgtattctcttagattttgcctccgtcccatagctggcttcggtctcggcaaagactgcaccggcggctctgggactgtataactggcccgccaggtttgatggtgggcattgacttcgttctagaagttcaatgaatggcaaagacttgaagataaaggtatgatagcgatagaggggaataaaactgttgattaagttcataactatccatattgttcagagtaacacaccatcggggctcaacctcttccgtaagacttatgacggaaaaaaaactagcaccaacaaactcaatctgggagttcacttcttatcctgggatgaaaatgagaatttcgatggctggaacggcgagggtgggaccgacgcgggtggaaccgatgcggctggagaagatctggattggaatgatgtagctgcaaaggatgcaggtacaagcgcagtcggtttcggcaacacatctgcggtgttgaccaagatctaatcgtgatatatgagcaaacgaccgaactaagacttgtcatcaggcactcactggattggctcgggagacacccttcatgtaagcacttacgcaatccagaaggtatgatgcgtcggacacaacaagaacagggggtggctccgagaagcccaaggaaaggcagtggtgcagtgcaccgagagactgcactgcctcgatctgctcgttaccggacgatctcgcatccattaagtacatgatgacccccaaggacttcttgttagcttcggtgaacttctggattgcagtcgcagtctgatgtctagtggttacgctcagccggctgggggtcaacaaaagtgcattgagcttgagggagtgagtctgatcgagtacgtcaaacttcgatagggttcggctctggtagattagcttgaagctgaagtcggcatctcgagcagcccacaaagcttgatgagatttaatggttggactttttgtgacggagtcaagggaacttacaactgaaatctttcttggagggctccggcgaggctagaagatacggtcagctccacatgttgactcaatggatgagagtactgtaccttctttcattgtttccaatgcagtcagggtggtggccagcctggcccattcatcacgtttgcggagttctgggttgtattcaccccgaagaccgagcgttggcgttgttggagtcattacgacagtagagaagagagattgtgtactgtcactgtcgctcgtttgaggatggaaatggagatgagactgccagaaagattgagtagagagaaaacctgaacaaaaatggaattgtcaggcgcaaaagaatgaaagagaagagaagagtggttgcctctatggacgtgatgtgtgtatgtacatttcagggaaggagcggaatatcaagtgactccgcctcgcaacccctactctctcgaaaacaaaacaatgcttgtgatatttccagtggtcttttctatggggtatcttgactgaatgtaaaaagcaaatgcacgcctaaccttatataataagatatcgctaggatacgagtatcaatcaacaatcacgagcttttcgatgcaggtgatgatgtcggactggctgatgcagagtgttcctgggtttgggatgtcgatgcagccttttctgcggtagccctttctgctgtaggctgggtaacaggcgcaggctcggccgtctcctcggcgcgttgaccgaaaggaatgtacgaggcaagtcgtgagagccacccatgtacgatgtccggcgtatccgactctccggcttgttcatatatctcaggagacagaatcctcttcgtgtgcaacttaggcaagtcactgtgcttcgctctgagctgcagtacctccttttctagtgccagcagagcttcgcgtgcggcctgttcggattgttctagatctgctagtcttccctcgacgccttcccggcgggtgctttccttgctccgtgaccgccatgactcaaataggatcagacctccagcaacaaggaagaggaaggactcggagatgaaattggcaccggactcgatagctttcgactcggagaggggacggatatgatagtgttgaggcttggccgcgtcttcagccgcagccttggccttggcctctgcctcctcggcggctttcgtgtcggcggcgttccgaacggtggggattgaaagcttgtgttttcgcgcttcggcggcggcgatggcttgacgctgtgaggcggcagtatcgcgcagggagcctagtctaagacgcatatcgaatcggtgaagagcctgggctatagacacgcagatattgcgaaaccgttcatgttcgcgggcctgggctttaatttgagactgcgtgggtcagtctatgaatatggcaaggttggactgggatgcaagcttacagcgatgggcttggacagggtccggattgccaaggaggagagcttcaaagtcaacgacatagctggagaatagagagtgaatacatgaggcttgagtcacttccttacctccgtgttgcccgtggacccgcggacccgcgttgattactcagcaccgccaacaccgccctggagcgatcttaggcttaatttcgatatttgcttggcagcgacaacagctgagattcatgcagttgatataatactccgtgtatgtcaaactactgcattttacagtcccactctttaagagagataaacagagccagtaatttctcgacatcgcacgggatgcagccaccctatctcattcatatagggctagcctgtcaggccaaatgtggcatgtacaaccgttcggagagtaaacaatgcacattctatggcctgttctttctgtcgcaatacacattgcatcctacaagcgcgccatcctgcagtaatcagccaataaggatcccagaataatgccattccaccaaagttacccccggaccccacggtggttcggctgaagcgacgttttaatataatttccttacgcgagacctcggatttaaccccaaactaggcagataagcaaaaattagcctctcctcatcgaccactaaaatggtgtgattgctttatgtagtatttggccctggaaatgttttcgcctttctctttcctgcaacgacgccatggcaggggtattcgaggaaaagagctctaagacagggagtcagtacgtcgtgcacaattttcacgatgtggaagatcaacccttcaccccacaaggtcctttgagcgctgccatccccgacgacgggcagatcgttacccagaatgaacgccaaagcttgatccggggtctggggcagcgccatattcagatgattgccattgcgggcgcaattgtacgcaaactgtttattaggattgcaactttgtgactgacctaaatagggtacgggtctctttctcggtctgggtggctcgatcgccaccggtggtcctctgggtgcccttttaggctacatgttcatcggcctgatagtctgctgcatccaatttgcgctgggagaagtctcagcgctgctaccagtcaccggttcttttgtgcgacatgcagagattttggtcgatcccgcgctcgcatttgcgatcggctggaatgtcgtttatggatgctttctcagcgttcccagtgagatctccgccagcgtggttcttattcagtactggacggatatcaacgccgccgtctgggtgactatcctcatagtggtgtcggtggtggttgccgtctcgtttattggcgtctacggcgagattgaatttatcttcgccattctgaagatcctgctggttgtcttcgtggtcattctcggtcttgttatcgatctcggcggtgcgccgggtgtgccccgacgcggcttccactactggaaagaccccggcccattcgttgagtacattgccaccgggtcttggggacaatttctcgggttctgggctgtcatgactaatgcagtctactcgttcgctggcgtggaatcattagccatggccgccgccgaaacgcaaaacccacgacagaatatccccaaggcctgcaaaagggtgttcgcacgagtctctatcttctaccttgccaccgtcttgatcgtgggcatgttagtctctagcgccgacgaccgtattagcgcagactccggcacggcggccacgagtccgttcgtcattgccgccagcgacgcaggtatcagggctattccctccgttgtgaacgcagtatgcttgagctctgcgtggtctgcatcgaaccagagtattctggccggaacaagaactctatatggtctagcgctcaagggccatgctccgaagatattcctgcgcacctccaagtggggagtgccgtacatgtgtgtgctgctgcagatggcattctctctactggcttacatgtgtgtttccaacgacgcaatgaacgtcttctggtggttcgttgatttgactgcggctggtaccttggtctcgtggattgctatcgctttcaaccatattcgtctgatgcaagcaatggataaacagggcatatcgccaacagagttgccgtggcataaccgaattaccagtatgtatcagtctggtttcagatcagtcttgaggttctaatactgaccttatcaaggatacacaagctggtttgcgctggtcgcatgtgtcataattctcttcactggaggattcacagtcttcacaacaggaaactgggataccgcctcgttcatctcgtcgtatctgtgagttttcttctcgtaccattgagttcgatctgctaacattgacactagggacattccactcgtcctctttgcgtacggggcttataagttgatccgccgcacaaatatcattcctctaaggacgataccggttcaacaagcgatagacgaggccaacaacgacccggacaacttgccgatcaagaaagacagcatactggcaaagatgaatattttctggggctgacatatctcctatcatagctagcagactagcctttcacttaataacataataacaaccccgtggcattgtgttttgctcccgttgttctatgtagtctcatgtaatcaatatatacatgtaatcctaataccccttgccccgcgtataagagttaatcaacggcccaccccgcgcgatacgctccagatttagctcaaggatatcaagcgagcgcgggaaatactccaccccaagcgcgctgacatgcggactaatctgaacattggcagcctcccagagcggatcatcctgaggaagcggttccggatccgtgacatcaagcgcagcaccactcaaaacccccgaattcaaagcatcgaccaaagccttctgatcgataaccctaccccgggagatattagtcacgtaaggcttactcgaatggtgctgagaatggtccgagagaatggtgaattcctcggcaccgaggagacggtttgtttgcggtgtcagcggaagtgagaccaccagatgatcgagcccggtagccaggaaagagcggagggattcgcggtctgcgccgtgatgccacgatgccgggatcgagccgtcgggatcgcccgtgccgggcacgatgtagccgttgtcacgccgggattcgggtgttgggcgtggggtggccgtgtatgcgtgcacggtcatgcccaatgcttgcgagacgcgggcgactgtcgatggttaacttttggtatcttgtttatggaatttccagcgagtggatgtgcggaaacatactttggcgcccgatacttccatatcctagaatacctacctttttacccacttggtcatgaagacctggcctatacgcggccttatcccatacgtgggatttctgtgcctcgtagcccttggcgtatctccgggatgataccagccaattcatcacagtccattctgcaatcggaggaccatggatacccgagcttgtagtgatggggatatcagtttcttgcagaattgggttttgcaaaatatgatccacgccagcagagaaggtgtggattagtttaagactatagtaatggttaatacatagtaggaatgattgaggtaggagcttacttcttcgagtccttgagatcaggaagatcgctgaaagtcgcgaggacggtggccttttgatatacctctgcgcgagtttagtttttgtgacctcgattttcaagaatgatagccacttaccagatggcacaggggttccctgagactcgtagatagtgacctcggcatgggagaatttctgtaggataacctccttcacctcttctggcatcgtcgggtagaaaataacgagcacatgctccggtgacaatggcgcgtcgcccataattgcgatagatagttttcaaagtgtgtgaccaaaaaagaggtttggggctttaaatgggaattctcacagggcgcgggcaatgttttccttatcttccccgcctcggtggctcaaaagggcaattcggcatctccaaggctaacatttccttataaacggatcggatggcggtttcttattggaatttggggagatggtggtggtttatgccagatggcgtggtatgacgacactttgattagatatggtctcagcgcacgaattagtatagtgcgaggctttataataagttgaaggagctttctagaacaagaatgacaccatcaacagaaaatcacatctttgatatcatttctactggaattgagtttgtgcctgagtgctagctacaccaggaatacctcagcctcctccgttctggtcgaaacgagtggtctactaaccggactcgacagtgttcgcctacacaaacgggtcaagataatttacgtttatatgtgtcgatgaatgatcttcattgtagacatacttcacgagccttggtatggattatatgcgcatacgagcccaaacgcgtcactcccatggaacgagcatctttagatagccacaggaataaatggttatcataagcttaatatccgcggtgaaactacatgcacgaaattgcctctaataatatactgtcaggccccttgtcttttacaaagaagcgggtcatagacctgcattcctatactccgtaaggagtactgtcgctgtagaacctcagctttctccaccccactcggcatagcacaagacctccaatttcaactccgatacaaaaatcaattcaatacacaacttaagccattggataacccatctcactacatcgtcacacgcaattttcaagcccaacctaagatgtctctggaaatccaccccgcgtctcccaaggacgcgcccgaactcgcgcaagtcttctacgccagcttccgtaccgactgcgacaaaaccatgttccccaacacgccggacgtgacagaatggttcgaacgcttttttagcgccgacatcacgcgctcaattgaaggcgagacccgtgatgtattcctcaaggtgacggaggggtcggaggatggcggggatcggattgtcgcattcgcgaaatggaagtttcccgtgcctgcagatcgcaatcggcatgaggaacagatcgtgtggcctgctagtagtgataaggaactatgcgatcggtttttcaatggtatggaggcgcgacatgagaagtggatgggggagaggcctcattattgtacgtttttctttttcttcttcaaatctttgggtttggtatttctcgagcagatacgaaggaacaccactaaccgttatagatctggatatgttgggtgttcacgcttcctaccagggcaagggactgggctcgagactccttaaatggggtctcacacgcgctgatgctgaaggcttggaggtttatctgtccgcgtctccggctgggaaaccgttgtatcagaaatatgggttccgggaggttgattccttctcgccgtaccccgattacgcgcaggtggcgatgatacgctcgcctaatagtcaaatataaccggattatttcaggaagcttagcacgctagaagtagaaaaaccgggacttcaaagcaaatcatcatttatcgctgcgccatgtcttgaagtctcttgtggtgtttaaaaaaaagaaattaggatatttgtgcgggatctatgtatacttattgttcttcaacctaaattagcgaaaaaaaacaagggtgtggttaatatgggcaagtacgttctatcggccgatctgcagaacttttgcggccctcacatattcttgccatctaatcaaaatgacatttcgcatgacgcttttagcatttccatattagattccttcaatttaaaaagaagaagaagaaaaaagaatgggcccgagcccgggatcgaaccggggacctcgcgcattaatgctttgggttaaccctaagcgcgaatcataccactagaccacccgggcagttgatagaataaggttcaggactggggcacaaacatggagagacatattgaaataccaaaaagagatattatcgctgctttgaatatcaattgctttgaaaaataacctaccgacttagggtgaggaagctcaagcaggggagcaaaggtctgccctagcaatggaggttggacatagagagaggaggttgcgggcatcaagacatcaagacatcgagagatgaagtgaaggtggtatttccttgaaccagaaaacaaggtccgggctaaagagtaggggtccggtatgatattatatatcaaaggtgtcatatatcatctccagggctccccaagccaagaagccgcttataaatccaatattgggtccacttcaagactgcggggtataagatggagagatcaaaacttgttcttttttgattggaaagcaatataaaacgtcatttccaaggctatctaaccccaagtatcttgtgtctttcattcaaagtattcaagtgaacctgtaacgccgagcttcccactttcatccccttggatatacaaaatgaccaaattattcatgtgagactctatctgaatataaaaaactaagcttctaacaactccatagtaccggtgtcacaggctacatcggcggtgactctctagccacacttgttgccaaccacccagagttctcatattccgctcttgttcggaccaccgaaaaggccgaacaagtgaaggcccagtacccatttatccgaatcgtaatcggagacctggatgattcagctttactggagcgagaaagtgccgccgcggacatcgtgctgcgtaagtatccaactcgcccccgatgcgaggagcatcctatccgcattctgctaagcctgcaaaacagacactgcagatgcgtcagatcacgtgggagccgcgaaagccattattgccggcctggtagccggccacagcaaggaaaacccaggctacttgctacacaccggaggaactggtatcctgtcctgggaggacagcgacaagaaagaatacggaaatagaagtgagcacgtgtacgatgactgggatggggtggatgaactactcaatctgccagatcacgcattccatcggaatgtcgaccagctcgtcctccaggctgcagcccagcatgccgatgtgctcaagacggcacttgtttgtccgcctacgatctacggtacgcatttccagcaacggaaagaaagaaaccatttacttattttcagcaggcaaaggaagaggtccggttaatcaacgttcgcgccaggtgtacgtattagcgaatgtgacgctccgtctcaagaagggcccgataatcggtgccggccagtcactgtggaacaacgttcacgtcaacgacctgagtgacgtctatgctctactagtcgacgcggcgattgcgggccgaactgatgacgggctctggggtcctaaggcctactaccttactgagaatggggaacactgctggggtgagctagccaaagctacagcagaggcagccacgaagctggggtacctgccagaggcaaagaccgaggtacttgaccctgttatcgctaagcagtatggaggatttgagtctcttagttggggcatgaactctcgtggtcgctcacagcgggcacgcaagatcctgggatggaacccttcgcggcctagtctggtggatgaactaccggagattgttcgtggcgagtgggagcgactgcaaaatgcttcctagagcagtcgtttgacatgtctcttctttgtctcagagcatgttgattggaattggtgggtttgaagtgaaagaatgcggggtgaccccgagagtttgctgggtcttatatcccgatcagcatagaatgggggatttgatgcgagacctagctatttaaatgttgaccggggacatttcaacttggctagagccagatcttcagaatcgagacatgtttcacccctcgacaatcaagcattatggcttgggctttctagagtggcacaagtgtaaataccagactcgactcgagccctcgagtatttaaagtctggtctcgtataataaggcgcagcagcgttttcagccttgtataagccagccggtgtagggatagtcgggattgagatcccatcaactcagcctgggacaatcataatcccgaccagcgggccgcataatactaaaagaggaaggagacaggactgatgcataatcatggtattcatgcattcacccggccccgactggtgagacggcgaaatattgcgccgactgttgacaagccaactgggctgatgcagccaatgaatgctagccatatccaacccaatcagagccatcctagagacccttgagactaatctcgcgattataacgcgaggattcaggttatagccagcggagtcggaaattctggatcacgacggagcaatatttcgccctgttctaaattgtatatgggattttgtcaattccgcgtgccgtggacatgtgttgtactcgatgctgtttatctatttaccatgcagattcccatttcaatttcttttttttttcttctctagtaggagcttatacatttattaacgttccactcatcttctgatcgctagattgccgtcgccgttgatctatcgccatggcggactcagatttcccattctatagacccgcgaggtccgaatatgccgataacacgagcagagcatctacagacgtgaaacggaaaaggaatgtcgatgaggataaatttgctttgggtcggggaggaaaactagtcttctttacattgtctgttctcaccttgatggccgctttggacggaacttcgctgtcggttgctttacctgtgagtgcgtcaacaaatgatttgatatgttgaaacttaccaggccaggaaattgcaaaagagctcaatggaacggctattgaagctttctggagtggaacttcgttcctgttatgctcaacaggtatgtggcaatatgttacaatacgatcaaaccctttaaccttgccatagtattccaaccgagtttcgcctccttctcgaatatcttcggccgtcgacccatgatcatgatctcccttatatttttctgtgtcggcgctataatcgcagcaatcgccaacaatttcacctacatgttgatcggtcgttccatccaaggtgtcggtggaggcggtcttatatccctaagcgaggtcatcataaccgatctcgtccctctgcgatggcgtggtcagtacttcggtatcctcagtgcaatgtggagtctcggatccgtgacggggcctatcctcggtggtggattctcggaaaatgtgtcttgggttagttgagctaatccatttaagctccgcaagtatttatgctaactacgaatagagatggatcttctatatcaacttcccattcatcggagtcggcgggattctcgtcatcctattcttgaacctcaagcttacccccagttcattaatcgacaagctccgtcgcatcgattatttcggtaccatcttgttcgtcggaagcgtgtcatccttcctgatccccctcagctggggtggcatttcatacgactggagctcatggcacacacttgtaccgctttgtgtcggaggcgtagggctggtcgttttcggattctacgagtactacttcgcctctgatcctattgtcccgcctgtgatattccaaaaccgcacggcggtagcttcgttcattgggagtgttttgcaaggcttcatcctatggtgtgccctctattacctccctatgtactatgaggcagtgaaggagtacagcccgattatctcaggcgttgcgctattccccgagacattcaccgtggctccgagtgggatggtagccggcatcctgatcacggtaacgggtcgttacatatgggctatctggctcggatgggctttttcgactgtcgggctaggcttgatgtgtctgatcaaggtggagaccagtatggtcggctggatcttcctcaatatcgtgcctggccttggattgggcattctcttcccatctctcggttatgcagtgcaggcctctgcggacccggagaacctcgctattgcggttgccatgtttagtttcttccgtgctctcggccaggctatcggcgttgctgtcggtggtgttgtcttccagaatcgcatgttcaccaacatctccaggtatgctgatttggcgcctatggccgaggcgtacagcaaggatgccgctggcttggtccaagtcatcaaggcgatggcagatggcgctgataaagcgaatctcaaggaagcctatacggacagtctacgcacggtctggatcgtctgctgtggagtgtctgctgtggcgatggtgataagcttcctcactgagcattatgaccttgaccgtgcattggagtcgaaccaaggacttcgtgaagaggatgatgatgatgagtctatcaacagtttgaaggacttggagatgcgggcagaccggagaattgtcacggagccccgaccttgggcgtggtagtggaagtttttctgacatgattgatggagatctataatgtataaagtaatgatatttactgtattgaagttcattcctagtacagactgttctcttgagcaaagtcttgctcccttcgtctctcccttcgtctctccctcgtagtctagtgtatctattttcaataggtgggattcatggacaatatatacatcggtgggatcttcgattaccggtattggggggggggggttcgaatgtgccgtgnnnnnnnnnnnnnnnnnnnnnnnnnnnnnnnnnnnnnnnnnnnnnnnnnnnnnnnnnnnnnnnnnnnnnnnnnnnnnnnnnnnnnnnnnnnnnnnnnnnnnnnnnnnggggggggggtgtgggtttgcgggggggggggggggggggttcgaatgtgacgttgccggggctcttttacggctagatgcgcgggaaagcttcaataaggaaactatacaatacgcaagatcccgaggagcaagcgggtttaaacatacggattagaaaggacggacgccacatgggcagtgatacgagacagtgcaagacatgtacatttctgcaagtagccgaaaaagaaaaaaacgctgttatacaacgatatcgacaacctggaagctgaacttcaaacattcgtgatcacatcccacaagaataaacataaaggatcacatcacagaaacaacaacgaatggtcgtgacatcgtaaagtagccatggtaaatagcagaaggagtaaagagattggatcaacgaccaagtgcacgtagccggtctttgagtagctgcatttctttgtcatattccatcccggcaggctttgtcacccggttattatctttgatcatcatagagcggtagcgaccatcgccatctggtgctccaacagtcacccagacaaacttcgttccggagctattgggctgcgaacgctcctgtgttccttgccagaatgcttcgtcgggtacggattcatcagcagaagcggggtcaaccgagggcgcacgacccccaagtcgcccgaattcaatccaaactctgagggtatctttgatgaaggtgattttctgcacgaaggcgttcgcatcaaggatgtcccggatgcggtcttcggtcgaattgatggaatctccgcccgcaatgctgaggaacgtagcagcctcgtcggaggccacagcccgagtgtcgaatcctgctgggtgcatcttgccttttgcggcgaagtatcgagcggcggaggccgagagatggtagaagtcgacccagggggatgagctacgggtgcggcccggcgagatcactagctttgtgtggtcggggaagttgaactggaaggcaccatccccaaaaccccagatgccgacattgcccaagcgctggtagaacttgacaaactgggcactgttgtgttgaggtagatcttcatccataatcccctcgtcgccatgtcgaccaagggctccgatcatgtatttaccgaactgatccacaagtttcatcctcttgattttctctgcatcggctcgttcaatctcggttcctgtgttggaacgaactctcattgccttcgagcttttgacatcgaacagtgagggcgatatcaaagctcgtcggatgccgcggcatcctagcagatcatcgtcacagttctcataaaattcaaccgaggttccagtgcgaggaactaattgatcagcctcggaatagtaaattggcttttgcttgccatccacgacgctacgggcttttcggcggatatgtctctcgccatctcgaagcacgacactcgttgccggctgcccgttttctgccttgaaaacacatccaacgctgccatcatctagaacatacccaataccataacggttggtatagtcgacccatttgatgacataggcatggggctgttttcgtgctccccctctgcgtctacttggtgcgtggtcgaccaggttggtcagcatgagacgcaagtcggtgttgacatcggtcaacgaagtcctgggtagaagcttgcagacatctgctgtgtgaaatataggactgagccccaagctagagcgggctctagtgccagccgtcttgccgtcagaccgagcggtaccattggagtttgatcgaccatgtccattagattcagaaaacttcgactgtgccagtgaagatgggctggctctccctctgtcgcctcgtccagcagtagtgttcagatctgctttggatatagaccgtagggatttctgattggcgatcacgtttcgctcctccagcctagcggttggttgtcgttctctggttgaaatagaaggctgcatcagctcctggtcagcagctgccaatctgcgagactgagagcgtgttttgcctacagtcaagcctgatggcatgcttgtggatttggctaatcgtggagcaatatccttgtccttgctacgcagcgttgctgtcgctgtcgctgcttgggtagcggatgccatccttcgtgtccggataggacgctctgcgagccctccaattggcacttccacagcgggcagaggttttggctcggcttttggactatctcgatatggcctggaggacagaacagcaggatcggggaccacaggtgccctccgaggagagataggtggcactcgagcttgctgtcgtagcgttgcggcatggctttgtccttccattcggcgatgttgagcagcgacgagagcggcattggtccgtgacgctgccatagggttgggacgagcagaaatactccgattggacatagtgctgcttttaagcatcgactcctcagggcgcattacctttcgggacgtctccaaaacacaccagtctccatccaggtcttggggccatcggtaaacataatccggcgacaagggtattacgggtcgcagacctctggagtcctccacatcacactcagaaaaggccgactttgcgcaatttctgccaacggatttccgagccgtcccgtcaggcttgcgtcccacgccgcagagtgagtagaaggccgctttgcaggaatgatatcgctgagcggggtcgtccacctggtacacgtacgcgcggagcttctcatccgagtccaagccgtacccatgtaccacagaatcgccttgaggtgaagcgtccctgagccatagtggcttattgaatcggcacgaggggtctagttgacgaggaatgcaaccctcatacatgttaaagaatgggtgctcaacaatatcgtctgggtctggtcgctcctcgtccaccaggttcaagcaacgactgactagatcttttgcttcctcggggatgtagttgctggactctgattcattaggccagacgtaagtcagattctggacttttttgtaaacttcatcttgggttttggattgaaagggtaagtatcctgcgagcatggcaaagctaaatgcgaacattagttcaacgacttcctagtaatatcgcggtgttcttaccatattacgcccacggaccaaatatcaactttctgtgtatgcccgcctttgctcttgtccaaaacttcgggggcgatatagttgggtgtgccgcatagcgtgttccgtcgcttggcatccttgtcggacatgatcatagccgccagaccaaaatccccaaccttgatgttcatgttgtgatcgaggaacagatttcccatcttcaggtcacgatgagcgacgaagcgtttgtgtaggtatttcaccgctgcgcaaagctgaatcatataccggcgcacttctggcaagctgaaacagcgtcgtttccgaaacatgtccatcaccgagccattgggacataactccaggacgacataggtgctggatccgaaagcgaatgcacggtagaactggacgataaaaggatgacgcattttagaatgaatctggagttcggttcgaaactgcgacaaaagtttaggcactgtcaaatgcttggtccgtatccagaggctcgtaccttctcctccatctttttttgagacatcgctgacttgacgaccttcatggcatacacccggccatttcgagccaatgtaccctcataacaaacagcgaaaccgcctttccctaagaatgcgcctatcgagtatcgctcaccgccatcttccggctctgagactatcgacggtggcggatcggcgtagcttttggacgttgcaagcttctgcttgttactcggaggcggggcatttttatcgaacggtttgcgatcaatcgccaccttcggcttgatcatctggttcgtcgtgcgcggggagagggcctccatgattggaaggtcttcttgttatgacaggcgaaataggagaatatcaccagctgaacgcgtgtaacggaaggggtatcgcgcataaagatcattaaacagtgaccatgtgacggtctgcaaaagggtatcaagttcgggcaatattggtatccctgcaacgaccaagttagacctcagtggagagctgaacacagatagaacttaccaaaatgcaaagcgctaaagaaacagaaatgtacaaagcttggaaaacaaataacgacacctcaatcgagggttggggaaggatggtgaataaatagtcggaccataacagtttgctcaacgcggtaaacaataaacactggccgttggcccgtgtggtgtggtcacgtgagccccgttgccagcgcattgtcttcggtagacacatacccacatagtggacatgtgtagatttgtctaaaaatatgaagatattcgatttagcaagaaactgtttggcttcaatctcgatgtgtttctagggctttatattagggttgacaataagaaatgaagtacataaatctcagccgcgaatttaactttacgaccacgaagtactgtacatattatccttgcacttttattggctcttaaggttgcggctatagttctcttgaagttgatcgaaatggggtttatccttagcttccagagtatatcttactgttgtatacatattctctatactaaattatcaacaagcctgactccagtggcatttcatgagaatttgccccagtacttctggcattgaccgctctttccacaccgccgatctattcctacaccccgcgcagggcacgcgtgcgcgatgatgcgcgtagtatagtatgaagttttctattggcagaggaaaagcgggtctcgggccttcccatgtacataccggggtgcaaaccctggaatactaatgaaatatgactgtacagcgggagatcgtacataaaccttctcaaaagcttaagcttaatcttacctagtatgtaagttgtacagagtatctatgtaaaaactcgcagcctatgcagcggccaggtcccatggaaacggtttgagaatatgcaggtctagagttcagcttttactaaagtggatagacaacaaccaaaaaggggaagcccactatcccaacgggctggtttatgactaaatatagttaaaatcatctcactgcccacagatttcggtatggatagataggcaattcagcaataatgttgatatgtggatcaaatcctgatgtttagtctccacaacccagccatctaggtacatgtcttactagcatgtcgtcattatatatcataaacccctctcagccattcctcggccaccacgccaatgaaaccgctaccaacaacggccaatgtccatggattcgccaagtcccgcaaatttggccagaaactatttttctcttcctgccactgttgcagctgcctatacttatctgaatcctgagaccgatagcgctcttcctggctagcctcaatttccttatcgccacccacatatcgaaggaataggtagttcgtcacaggtcctagtatgacaactggattaaatggaccagccatgttgagtagggcaaaggagaaatggaccaaagtgtctccaagataactagacaagcatcagtccatgtcatcgaacgcaaagggtgatatacatatcacgaaaacttacttcggatgccgcaccaaactccaaaccccatgtcgacacaaatccgtccgttctcgtcgatgcagtgcaagctgcgtatctgccatagcctccaacgcaaacccagcagcaaaaagtccaacaccaagtgcccgaacaacattcaccccgtcattgcctatcgggagcgtagctccacccatagtgaacgggaccgtgaacggcaaagagatcacactcaatataacagcctccgggaaaaataccctcataaacccacgtctccaaaagttccgctcttttttggctgcgtcgtaccgcgcatcatctgtcccgcgggacaatgaccggcacgcaatccgagcaaagagtctcacgccccagatagtaacgcagcttagcagaaccctttccgaccatggtagagcctcacaagcttctctgaatgagatcttgtgttttaaaatcgggtgcccgatggcggtccaccaggcattgaggacttgggcggagggccagagccagtctttgagttcgactctgtctgttacttcggctgcaaggtatgttgcgagtgagaggctataatacagactgaatgacggtaggagggttgattttaggattcctacgtcgccgggtgtgatgttgtttctgaaggatggggattggagagcgctaggggcctggttctctaggacagaggggggaatgaaaaatgccatttgggacacgatctggaatactggagggttggctacaaggttaatcaatgtattgtgacttagttgtgctgctcagatgttgatgtcaagattatgtaatggccaaacggagttagacttccgcacggcccagtaaaacacgtggggccccaaattgggttacaaacaatgcaaacactctaactagagttgagcaactataatggacatcgtctcgaagcattcttcggcaaaaaccatgacaagcgctggacagtcacaatttcaataagctatctgaccacgggcggaggccacgggaatttgtaccatgtgcggtctagtagaagtatttcgaactggaattggcttgatatatcgctgcggttgaggtacatgaacggattttatggtttgcctgatcttaagacatccaccagtccttgattctttccagagatgaatctttaagtgtattggatttgcctatgtacatcgatgcccatgaaccacattaccgatttaaccttgagaacctgtacccgcttctgctgctttgactgctctctgataaatagcgacagttccttcagatactataagcatcttttttagttcttcgagctcctctgggtcctcttcgttttgagtccttgttttccaatcgtccacttcggcgcgcgcatcctcaagctttccccgcaagcatgccatttccgcgtgcaccaggttttctccttctagcctatgatctgtatcttcctgcagtatatatacacaaaatgacctcgcttgcgccacctcaaatgcatctccattaaacgcatcaggccacccattttcaaggtacatctcccttaacgaaagaatggacccatcccattccagcccggtgttctccccactacctggaatccattctaaagagcgatacgatcgcaaaatatcccgaagagccgcctcagcatttctgtgcggaatatgctcaaagctattccgattcaacgactgcggttctttcgtcggatgaccttcaagagcgggatcggtcgtgtcccagctctcctgatcaataatccaaatgacatgtcggcgtgcatcatataacatgacgctgccatgattacccaggctggtcaatggtgtgacccagggctggatatacgggccattttcatcctcgaaattcggatccgagggatccccataaaatgggtcgcggcttcgttcggcttgctcgatatccctgaaatcggtaaactcgccgattcgagagaatgagtctttccccgcagcaagcggatcaatatatggtaggatgctgtagagatattttattgatgagtccaggtcgagctcgtcataggcagcctccaggtgggttaggttgtgtggcccgcgcctaattcccgcgcgttgaatatagcgcattctggaaagttcctcgtatatctcaagcataaggtccgccactttctggagacgtgctttttccgagctgagcgttgtcatgatgagggggctagcattgataatggatgttcggtatcgatgcactggaagcgctaccagaacgatgaaagataccacacagatgaaagtgcggaatctcatggcaagaagatatacgatgagatgcaatgccaatgttcaagagctgcgatgggataatgcgcttgtaaagcttgatatattcgcagattacggaatcaaggcggtgagaatataagaactctgatccgctctctgaatattaattaccatagaatagttaacagacagttttgtaggagccaatacttgagaaatactaccgacacggcnnnnncaaaataggtaaccaaagtatatgaagtcatatagccaaaacaggtaaccaaaacatgtgaccaagtcatgtgattatgtcaggtgattatgtcaggtgatttttaggtttgatcatatgatatactataccataataaattacaaaggctggtcgaaaattgcggccagcgggagacttacctgaagtagtatggcgggcaacgtgacggtagcaatttccgcgtgtcggtagcatttctcttctccaatacttaatggtcattaggcatttttttcaacataagcactccttccctaaacaccccagaatgatgacggtctgatattccatctatagaatataaggtaatctttaaagatgtagataatatgagacatattaggagtaagtattcgagtatggcggtcagaaaagaccttggaagaggtattcagtgggtaggtatagctagcctgaattgctttgggctatttgcacatgcggagaaataatggtggcaagatcaatgtgcatattcaaaggctttgattgatccatgtttttgtatttctgcttcatgagaagcatcaactgttcattccagaacggcacgcatgtttcaagatcaggtgtcgagaatgctgtagtttcgttgtcattctcagtatatagattttctgatatattgcacttgaacaagttcgagccggaagataagtcgaccgagagcgttaaaccgagatcatgaaggtcggagccatcaggtatacgttcgaagggaagtcggttggtgggtagtctctttgcctttccgtcctttgtgaaagtttcgtcggtagaatgatcccttgcctgacgaatgaggtatgctcgtggatcacgaggggaaagcgttgtcgcagagaccggctcgctgaccgaagcttgcgacgaagttaacgcagcttttgcggcaagataccgacttttatgaggcgaatgaaattctggagcagactgcgaactcgatgttttctcgttatcgctgacgcgcatccgactgttctgaatagcttccttcttcctcctttcgaagtctagtgctttctccagatctggactgtccgaacaaccatcgttctgcccatcgatatgcataatatctggcaaattgttcgtgggcaatccgaatcgttgctgggtaagaaaagaaagcggtgagtctggttcttgagttggtgcttcctcagtagggcttttctgcagcgagacttgtgttgttctctgaaaccaagtgtctagagcgccgttcccataccggtctcgatcacgttccctctgagcgcgtcgggcgctcgaaatacgattagtttcaggggagcactcggtcgattcttgtggatgctggcggcggcgcttcactggcgacccagatgcaagtcttgaagtaagaggacttatcggggctgagttgggcgaatgctggacaactcgcggttcaccctctctttggattggctcctgcaggctaccgctagatagatccacggggcttgtttgattgaggtaattgtttccgcgacgcggtgtttgaaacgaagcatttattctggacacagaccacggattgacgaagctgggttgcttacttctgacagtgctggaaggaaccgggggcgaaagggcttgcggattctgtgagagaggcgtgcagggtgtagctaaactaaaggggttgtcaggatcaccagggtgtgcggcaagctctgctggcttcctagccagcaaaagttcgaatcctcctgagctctcattcggtttgcaggaattctctttcccttgggtggaatttctcgtctccgttccgtaatggtcgcgaaacatattctctaccaaggccaagactatatcttggtcttcaaacaggatgttgtctttccctggctcgatattgacgtcgtacgtccctcggggacagcgaatttgtaaacagagaaaaggatcgctggactcctttaagacgacacggagatgctgcttgaaatttttgacaatctcgtgggcaacacccctgctgttagacagagggcggccatctacactgatgaattggcctgcattgttgatcttcgccgtatctgatttggttggtaaccacatcaatggatattcaacaagatgagcttacccaattgtatatttttcggaagaaaagccgcagcttcatatcctgtctgatctgatttttctttcaagacacaggaagaaaaaacttccgtgccagctatctttagaactgcgtccgagagcgacgcgtctgcgctcggcacgtagacccaattgctattttcaccttttgtcttgaggactttgaatgagaacctcttcaacggttgagctatagcgtaggcctggagaagtttcttgatcttcgtaagactttttgcagcacccttcaagatagtctgcctgcggacaggtatatgcttgagaaattctgcgatacgaacagttgtgcccacaggatgtgatgtccgttgtgttctgcgatgcaagtttagtagtggcacagaggccaaaaaatctggcgaggtcgacatacccagtaagctctccgtttcttccatacttcaaacatcgtccggcaacttcggactcaactcgagtggtgacagtgacaagcccagacatctctgcgacactggcaagtgcttcaccacgaaatcccaatgatgaacccccgacgtttttgagatcatctaaactttggatcttgctggtaaaggctcgtttgcagacattttgctggtcctctggagagattccgtggccattgtccttgagttgtatgacatccacggtattttgggaaatttcaacctgtaatgacgtggcagaagcatccaaggcattgtctacaagttccttgacaacagagcagggatccgatatggcagatgtggagccaatcgcccggattgtcttctggggaagagcctcaattgtcatcctgcacgcttggtattagttgttggtattagttgttcatctccaaaagcacaaattgtctcatccaggtgaccgaaggccagaaatacatgcgaacgatttcaatggcttatagttgatgaacgtggactcggcgaaggaggatgggaggatgatattgtcttggcatcctgggtcacgttatgctaatgccttattattcaggccaacatactctccttgtctaggactgtgccaatagtgttttactgcacttctgcgttactgtctcttccctatcgcgcaaagcatattccattcctgaagctcatggatttgattattgctaaataatcaagaatgatcttaaaattaggccttttcctgccttttcctgccgtctacgagacctctcaaaagactgctgggtcatgtggttctcaatgacgaaggcctgctcaatgaaactgttttgttgtccaccggtcgctatatcttacctcactctttcaagcttcgaacatggaggttttagggttccgagtttgtacccgcctagtccttttcatcgtaccttttgattctcttcatcctgggcttcaaacggagaacgataataactcgatcactttatatcaatgccggccagcatgatactcgaactccaacaattcccgggtggatttcatcgcccatagtgcctactctagagcgggtgttctgcgacaatcatcgacgaggcacaataggcaaattcatcaaagttttactcgtctcgcctttcagacttctgtgatcagtccactgttacaattactcgacagaggcatatgcaagagacaggagacggactaccatactcgaagaagaaaatcattcctggtgtgtgagtgacggtctcatatcttgaggcgaagtgctgtggataacatcctctatgttagagatgacttcgccgaagcaaaggatggaaatcatatcttataacatggtccaacacgagctttattccttcttgagatcctttcactttccgttcatacgagcatcatccacaatgcgtgcatgacgctagagtcgaaaattgcagctacagcaagtaataccttcacgagtgacacaagtcgttcagcaacaacacagcggattattaaacttgaattaagacgtggcgtcagtgattcaacggcccaaatgagtggtaagctatgtcatagggttcttacccttatgactttgaatatgacagccaagttgaagcaattttatctaaaacatgcaaccttagatgcatacaacaaccttcgaaggaatggtggatgactaaagttctgcctggcaataacatccaataggaaggcacatacagcctcattagtcatcatagtcacagcctcaataaacaacgtccaactttatgcctctgcagcttcttagccttgctcactcaaacggctgaagacgccgaaatgttgggcgaggacttttcaatcactaagctcgcaattcccgccgtcagtgttctaatcgccttcctcgcctacacatcacagtacttgtttctgcatttcgagtctgcgcctctcaagagggacgaaatttggaacatcaatatcttcgctctgtgcatctggatatgctattatcgaacctgctttgtagatcccggtcgacttcctaaggctgaagagcgaccgaaacccaaagagcaagaaggtgaagcactcgctagtcgccagcgatggtgtcgcagatgtgaagcttacaaaccgccccgcgctcaccactgcaagacctgtaaaaggttagataaggaatgcttgatgtggaggattttgctgatcttcttctagatgcattcctaaaatggatcatcattgcccctggacctcgaactgcgtctcacattttaccatcccgcatttcatgcgctttctattctatgcgactgttggcatgtcctatctggaaactcttctctggcagcgtgcatcatttgtatggaagaacagtcatctgccaagcgtaagtaactctggtacttcttttcatcattcatgcggctaatgttgaatagtatctcggccccacgttggggcagctcatccacttgttcatactgctggtagtaaatagtttcacgactttcgccctctttgttctcctgcttaggagtttatgggcaattggatctaacactaccaccattgaaacttgggaaatcgagaggcatgctactcttgtccgtcgagcccgtgtgctgggcgggtatcttgagggccctggaggaattcgagttcacataaaaaagcaggaatatccatacgacattgggatctgggccaatatcaagcaaagtatgggcgggagcgcgaatgtgagtatgcctgttcatggtccaaatattgacacgcaaacacgtaagctaatgtctttttaggtcataagctggttctggccactggccgcatcacctgatcgccggtccggctgggaattcgagaccaatgactttgagggtgagtggttgagtcagtattgtgggttttcaattactgatcttttttagatcctggtgtatcatggccacctccagacccagatcgaatcccggtgccggttagtacaaggtcggataacattagtatgcctgcatacgcaagtattcaggacgagattgatgccttcaatcgtcgtaaacaggaagacatgaagcgattccaaagtccgggtgtacagcgtcgcaagccatttcacgaccggtacaaaaaaggtgcctacgctgaaagtgatagcgatgagtccggaactgactccgggggttattcagaagagggcgaagagtcttggcgaaacgccgaaggagaacgactacgcgactttggggtggacgaggaagcagaattctatgatgaggaagacatccctcttggtgttctcattgagcgacggaagcggcagcaatctgctaattgaaccatttccgacaaaaatcatctgtatcattagatctttttcgcaatacccctgagtcgcacatatcccagccattggctcccatcttcaccacgagttatcacgtcctggagcacatcgcaaacctggcgcactgcagcatcctgcttttcctcggggagcacgtccaagaactgggctcccatcagtctaacccatccctccagaccgcccttggcgtcagtggtgagttttgttgggcggtactctagctcgacgttctcgaccttgaaaccgatctcttcaagagcatttctcatccaggtatcagatgggaagaaccaagggcttgtctcatttgcttgtttgacagggataccctgctgcaccagtgcgcagacaagggccgtcttaacctcggccacattgccatgtccgcccatttcgaatacatatgtgccgccaggcttcagacagccatagattgcgcggagagttgacatgcgcgtcgactcatcacgtaagatccagtggagggctgcgttggagatcctgtctggttgttagaggtcgagttccatgcatggtggaccatgtattataattaaagacatacactttatcccatgatccattgacaatggaggcttctttctccaggtaccggcaatccacaacgcggaagctggccttggggcttgcgtagtctttgttggcagactcgatcatagacgcagatgagtcaatgcccaagacggattctatggcggggaggaagtttgcagtgaattttccatcgccgcaaccgacatcaagcaccttgtctgttggcttggggtctagagaggtgaggagttttccggtgattttcgcggagtgcacgaaggatgcagaggcagagtatgcctaggcttgttaattatgattcacacgtatcgccgggaggaatacatacttcggccgaccagtggtctttaggaccctccgtattggacgccatggtatatgacaggtgcaaatatggagaagtggggaagtcgtagtcttggcgtggaatatcagtcaggaacaatggaaatgatagtcaatcaagacgtgagaatatttcaagagttgttcctagtaaattctttcctggttatcgaaaggtttgatgggctctcttatatgttttctctgtagagtgggcagttattcaaggtaggataacgaggccgatatcggaccggagatatacttggccgccagtacgggcgactacataagtgtaccatcagaacataactctctcattggataatattgccaggcatttagatccacccccaactgtataatcagagctcttccacctggacactgtaatgtgatcatgtacgagcacgtgccctgtcatgtgaccatcacggcccgtgcggtcccgtgcggaccatcctgccggtactccagttcttctgtggcgcggacatttagtaggcgaggcgtatagttgctgttcctagaggagtgataacacttgcttgaggtgttttcggtatttctcgactgaatctgaaaagatcaggatatcaacaacacgttacgtccccttctcgggcgaaacgtaggggtctaagagatgagaagactatgggatgactactgagaatggaaaggtggaaaggtgtttgcgttgctatctatgcctcgggagtgcttttctaactatccatcacatgaccgcctagtcatcctgctctggaaacccccactaactaactagtgtgtaggatggtccgcaacgggaccgcatgggcccgtaatggtgacatgacaggggggatcacagtaactcaaatggcttccaccactactaccaataatgatattccaattgaaaattgggtttttatgctagatagagagtattaaattagataaattcatccggtaattaatcataattatggtgtaattctacgaagaacgaataccagagccctttgataattgtacatacaacgatataaatcctggaacttgggcgaaagcactccgataaggtggtgatctatagcggtgagctactatctaataacagagttactccgtatgtatacttgatcgtccgtacgcctgcatgggatgcacagacctactacgtatggaaggtctagaccttttttcttttcgaataacttcttattagagactgacagttatattcaaactacgcagcttatacgggctgtacgatttatactagccaaaccaattgatatagtgtccgggcacatcacatgtaaggatctatacctacttacatgtcaggattacaagacatcactgcttgcccttacaactaactacgacccatacccctttctctcctgaaatgctcaaacaacaaaagtccagtccagacttaaaactgcaatcatattgggcacctagtgggtacacggaaatggcaatggcgaaacaattcccttgagctccactaattcactgggcgaaatcccccctgacttctgcaaagtagtatatatatcaggatgtctgatctaacaagctgcatattgaaatatacaaaaccccacctcttccaatcaatcagacaccatgtcttaccacggccattgcaattgcgagagcattcgcgtcactcttcccgagcaacccgagacctcagctatttgtcactggtatgaaatcattcttgaacttacaatcatttgtcttgatggtcatgtactaaaatgattctgcaatgtagcaataactgcaagcaagcaggtggtggtcgtaagtacattcgtcaaggcagctgtggagtgtacattgcttacaactatcttagccttctctgtcaactacattgtcaatgaagatgacttgaccgttgaggatcccaatggggctttgaagatctacgaggacaagaattccgatagtggcaatgttgtgaaggtaaatcgttgtccatctcgaagtactattgtttgttcgaacaaaaaactaacctcgaaatagcgtcatttttgttccagctgcggcaggtatggaatacaaattcaagtccagtgataactatagctaacacctattgcagcccagtgttcaccaaaacccccaaggcccctggagtagtcttcctcaagggccccttgtttgacattgtctccactcctgcacttgaggtgtttaccaataagcagtacgactgggtgaatctcaagcagggagaaatcgaggcctgatatcaacacgaaggtaggatcgacatggtggtttgagaaaatgtacaaaaaaatgaatataaacattgtcctatgcgatggcgcaattctcagaaagcctgttattggtccatttttaagcataaaattcctgtcgcatttatattcgtttccacctatagtatagcttctacagagtacggagtaccttggtgatatagtgtttgagcagacgtatgtagatgacttaaagcataacggtttaaatgtggggacgggataatttatttcaacctcccatctctcaagacaacggcaaaagcgcaccacgccgtagccatgctgctctctccgggctaagactacgtataataatatgacaaaagtccctgctcaaacgtccggtcctaggcgaccgtccggtgccattttgcggaacacccgaccgcgcgtcaacgacaacatcccggatccccgcgaagcgctcgagctccagcggatccagacacgtgaggacaacgagctggactactcaacgccgtctgcttcttccggcgatgaatatcacgttgtgacgcgtcgcactacggcacgcgctctcgcgtcacgtgccgatgccgagcgtcgccggcaagctcgaaagggggcttggggcaagctcacccggttttggacgcataatattactctaacagtggcgcataagagcagtcgggattatttcggtgcgtattttgcgactgcgaccccgacttgccgatctgcataattctaactctgcatccaagccttggagagaacattcctcgcttatctgcggacctcccttaccgttgcccaacaaggcgtgctaattgcacagctgttccgtctgcaggcggcggaggagttggcggaccgtcttgggtttggtcaggtcggtacacccctgtcggtcgcgtgtcactgtgtggctattatcgtggctttggttggggcgtatcgattctggaggcagcagaatgctattgctaggggtagggtctatgctggaggctgggacatgaattctgtgggggtattactgggttgtgtgagtggtgcaaatgcttttcggttgaagatgtaactgacattggctagatcactataacggtgttggttgtttccgttgctattatagtcgaggtcgacgttcacccgtctatattttttcgacgaatattagccagctgagtgatcacggagatatgtaagtttttatgaatcttgtcttggcaatcatcagcctcatatctagactatgtaaatataattctattgatttaaggctatgtagcggagaggcactttgaaatacttacatgattcattagttcataaatgtggagttgattaattagtatgtaagattatgcatatatgtactccgtatggatgcaatccttcgcttcatcatatacatgagaggtcgttgatgagaagtgtcgttgttcggaagacgtcgttagtaagaggcatgaagctcctcttcaagaatatgccattttctagcaacctctgcccggtcgtcagcggtcgatgtccgcatgtcttcaatgccttgcgctatccgagatgccataatagaaagctccacgttcttgcctagcgacttttgaagttgtctgcgaattccaaccaagggatatccaaagagtccccagagacctagaatgttgagtcagaatgagattcccgcggcgaaatagccgttgggtgatgcatagcgttaacatacctgctggtggcttgaagataacacccccaatccctttcccgattcccttgatcattcctttcgctccttgttgcttggcgccaatctgaggctgggtgaccagacccgtgataccgtaataaaatccatctcgaagttcctagaaggtcaagggtcagacatgatatttttttttcccatcgaggatgagtgacataccgttccagctgccgcgagtccactacggaagcccataaccttgggcatatctttcaccattcggtcgtggtacaacatcggcgcattgtgaaatcctttggacaagctgagagtcaagtctgtcgggagccagagtatgctttttagtaactttttcgacattcgactaccgtgagtacgtatttcgtagataacaccctgcccatggggtgtctctatataactcaatagtttcttctggtcaatcggtatgccttgtttttggcccacggcactagctggtaactcatggttcattctgttgtgtcttatgtggtccttctcgctgtcgttcgtgtcgaggttcatcaaatcattaccatttgatccaagtccatcatggcactcggcaggcccatgatactcggcaggttcatgatactcatcgtcatcactatccaggcttgaatcatgacttttgcgggatttgccaaatgaaaaccttgaggaaccactgcgatcacgagtatgacctattgcacgaccggcctcgacaaaatccacaacgatgtcataagggacctcaccgatcccagtcacgaagttcgcaatcgctccaactagcacctgagctcctgcgctaattgggccgacaggattacggtatgtgtcatattcctctgctcggttcctggacagttgattagtggtgtgaaatattttggcaaaggccaacctacaaagcgacatcctcgggtttgatagcccccatttcaaccagtactgctgcagcaaaggcactcagcccaatggaagtttgcttaatgtgccacacagcaggacgagtaggacatattgcgcattgtaaagtcttcaagttaagatgacgatgaaagctgcgtactccatcccgcacaccggactctgtccgcatcttatccgcaatttcttgagccttcgcttgagttgaaggtagcaatgctgtcttaattgcatcggtcaacttctcaactgtgagttgcttgtacgggacaggcatcggcccggccccagccatcgccacgattcctccccagaattgttgatctccaaagaagggaacgatgatcgtcggacgtccaagcgcaagccctgcggcagtggtacctgcaccgccatgatggatgacgcatgatacgtgctggaataaccagtcatgtggtatgctgccgacaatgaggatattatctggcacgtcggcatcgtcgattccgaggtttccccagccttttgaaatgattgcacgttgccctgaaaggtttatcgcttcgaacacgattcgagttagcttgacttggtcttgaaccacaattgagccgaatccaacgtagagtggagtgggccctgctttgaggaaatcttcgatctcttttgggggttggtagtttgactttctaggtagcacacaaaatccgcaaatatctatttgatcaccccagtcggctggctttggcaacaatgccggcgacctaaagcaaactataattagtgaatggtccaaatctgccaatttcgggtcaacccataccacagatatgagaacggaacgccgagacgctggggcaaactcggcgccgtgatcgaatctaacggatcgagtgcgaggcacttcttccgccacgagttcacaagatctcccaatccttcccaaatcagcatatccacaacggaataagacacgaggtttgcgactgttggcttgcaatcctgcgggtggagaacggctaaaggatgtggaaacgactgtgtaggcgaccagggcattctataagaattttattaggtatccctcaatttcacgcctggaagtagactcacgtaaacatcagatgaagtggaattcccagccgctgtgcgcaatgaacatggcccaaactgggcggattggcgattattgcatcggcaacaaacggcctccgacgataatccacagtgtcactccagagatcctctttgatttgatgcatatctgtgccgtcgcctgtttcaatacatgacctccaacagccgtatataatgtccttcatttcgcgccggcgtttttgtatggcaccactgcgaatcgtgctgaatgcggggagtaaggatgggttctcgaccatgaatgccatcagttgttcggggtctccaccgatgctgaagaactccaagccgccctcaagtacaaaatcccggaaatagaggtgtgttgccagacgtacgcggtgtccacatgccttcaactccttccccagcgcaatgaacggctggatatcaccccgagatccgataacttgtatgacgatgttcagcttcagtgggaagtctttgcccttatccttcggtattggttcaggggtcggtttgccctctagatctggtggccgagttgtcgtttggatgcgatgtaatagccctgctagttgtggcatatgctcgttgattttgatatcaacccttccatcgtctaccagcattaccgttagcgacggtttgtattgcttcacttgatcacgaactcaagactttgaccccggcatttcgcccctctccactgacatgcttccgttcgcggtgtggggagatcggaacgctgacctccccaggccagtcctccgatcggattgacccatggcgactggatctgggcctcaaagttgttgatgccgagtccattcttcgcgggagatcgacgatgtggccaactagagtgacacagttcaaaattggcaggggggatcagtgtatgttacactaaattataaatagtaatgagtatgttcatattagaattgtttagaattggtcacattgtgcgggatcaaagacattaaaaaagaatatgatcagctctactctgatgatgtcagaagggtccgcagtctattaccgccggtgcgtcagttcggattatgccagcagtatagtttgtaatacgagttttatacatcttaatgttatgcataacttatcttgctgctaatacccaatgctataacatttttttttcaatccgtacgacttgatccgttaacttatagtcatgatatagaaatagagcaattttctcttggaagtcatgaaaggccggtgagcccggtcaaaatcttgaaaatgtcaagtgacggtaatcagagtgccgcagtcccgagtctcaggccttcccggataattccactgcggatcccgagctcgggatcaatttggacctcgggatccctatggattagtcatctttatatgcagcccttgttggacattctcttgtgcaggttatcgaccgaggtcgaagatcattgctatccatgttttctatttcgtgccaaagattgtctgagacattataggttgcacacttcaagctgtgtctgtagtaatgcgctcggtaggatgagctggatccttgagctacttgtaatagaggtcgacgctctggatcgagcatattatctgcaaacttgcgtttaaacttcgaaatctcgcaattttcgagcggaattaacgggaagatcttgtattggcttatcatcggaaattttctccgatatcaagccgaatatcttccacatcctcgtcgatccagtcgatccattctgttgccttgaccggctggtcagcatcctttgtctaaggcgtaccatcgaagcggatgagcggttcgatgcttatgaacatcgaaaagctcttctcgggtggattcaaccgttcattgcaagtacgatgttcagccgctgagattcttaggtgtctccaagggtgacaggttggtctcccctcaggacatatattgacagctcctgggcatagagaaggttgctttggtaaaacatgttgaatttaagaactggggatgggagcgcttaactttcctatgtaggggcagtccagactccaggccaagatccgatgactcatctggatccacccccggctccggggccccaggaccgccacccgtgggtgggttcctttctccaacattggaggacctgaatgatattggctatagcacaccatcctgaggtagctttagataatgaacagagcactctattggccattcttaggtgtattttatctctaaactccgaaccttgactgcgatataggaagattaagatctgaggcatagcggtagcacctgaaccttttggactcatattaggccataggctcaaataatgggagcctgctaggagaagcaacccgtggccctttagccattgctttgaatggtttatgaatcaatcaaatcatatcatatattctatacagtctgaaatagaactacatgatcccatggatcttctagggctgcatgtagttatgggcatgtcctagttgacattagaagcttacgatctcaaagcactgatgatgtagtttagtatgctgatgtgcagtctgtatcatggttatggcttgcgatgtatgcttaatacctgcggtttttcagctcgcgccattctaacgagacgtattagttttcggctggtatcataaaccgacgcaatagccgtgctgaccttggcaaaaagaagttcgggctcatgagccgactccttcgcaagccacacagtcgaaaatcccatataacttgccttgtgatggacttcgtagcttataggtggatctgccgggtttgcgtcttgatgactcctgtgtatagaaaagattattttggcgcagcacacctatatctatgttcaaatgttgatcaactgagggcagggaggcacttagtgtggagtgaggacgtcatgggctgagaagtcatacgccataaatcagccaagttgcccagccctgcgggaggtgccgaggtttgctggtttatcggacaagcgggactggcccggggtaggacccgaaataccccgtgatcaccgcatggtgtaccggatatggccagcatttgattggttaagtacacaaattcaccgcctcactttccttcgctccttcaatgcccctattttatgttctgatctgatatatggcttacggtatgagaggcgttagggacatcatatgggggccctttggaactctgtttagaattcgttttgggggctttttgaggggttttccccatcttggtgttatagctagaaggatagagaagtttatacatgatatacatattcagaaccagctatgcagaaattgaaacatacatggctggaatggcggttcaaaatgaagagttcctgctaaacgactttgcaatataacatgcgatatcaggatcttaatctatcgtaaatctggagatgttcatcctctaccaaattcaaacccaaccaaccgaccgttcaaccaattagacaacggttgttcaggtgcgctgctatctcacgctgtacaccgtctgactgaaggattggaaactcattggcacccgcagatcacttccgaactagacagtcatgatattcgtggggtgccttcctcgccaatgatactgaaagcggcgttttttaccggctatgggaaaatggtgtccgagccggaaaatggtgtccgacttggtgacatcccggggccccgcgaaaagcctcgagattcatggccaagcgggtcttccccgcattctctcccggccgatggcgtcaagtcccaactctaagtgtcgaatgcattgtacgttcactctaaagggggcaaaagagttggggtaattgtagtggctgtggttggtgtaccgttgaatgaaacaaggttcacattccgcagttttgcttatatttgaaagatatcctccattgtttctttctcaattggatactaagagcctttcttaggacaactacctcattcttacccactttaaatatcactgcttcttagctaccgggcttcaaggaagaccatggcggacaagaaagactccccagagagcgaacattttgaatccgaaataaaatcggaccctactactctcatatcaccccttggatcagaaagaaaaccatatggcgaaactggtattgcttcccctactgtctctatactcatcacatactaatctaccgtcgcaaaacaggcctgaagggcatcctcacaaacaagtatgtggcagcatgcgccgccttcgcaaccctgggcggagccatgttcggctacgaccaaggtgtcatctcaatcactcttacaatggaccaatttctcgaaagattccccgaagttggtcccgatgcacccggcgctggattccagaaaggaatcctcactgccatgatcgagctcggagcctttatcggagcaatgaatcagggatggattgccgacaagatctctcgcaagtggtctatcatggttgcagtgataatcttcctctttggatccgccctgcagacaggagctatgagtttctcaatgcttgtaggtgcccggtttgttggaggtatcggtgtcggcatgctggccatggtggcaccactttacatttctgagatcgcgcccccggagattcgtggtactttgcttgttctacaggagctttctattgttactgctattgtggttgctttctacatcacctatggtacacgatatattccgagtgaatggtcgtggcgccttcctttcctcattcaggtatgtcttctttgttaaccatgattttccctaccctaaccaccgatagatgattcctgccgtattcctcgccgtcggtattccattcctaccatattcacctcgttggctcgctggccgaggccgagatgaagaagcactcgagtctctctgcaagttgcgcggtgtcgaccctactgacgagcgcgtcatccgagagtgggttgagattcgcgccgaagttgcttactgcaaagaattgagcgttgtgagacacccaaagtgccaggatggaagttacagcagccgtgctatgcttcatgtctggagctatctggactgtttccgcaaagggtgttggaagcgtacccatgttggtattggactgatgtttttccaacgtgcgtatctgtctgtcgtggtctaaccaccactttctctccttttcctcctcacagaggctaacccatatccttctcgcagaattcggtggtgtcaacgctctcatctactactcgcctagtctattcgccggaatgggtctagactacgaaatgcaactccacatgtccggcgtcatcaacatctgccaaatgctagcctgtttctggtcactatggggaatggacagatttggccggaggcctttgctctttggcggtgctgcctgcatggttcttgcgcatttcataatcgctgtcttgatgagccaattccaatcggactggcctgatcattccgcagagggctgggtttgcgtcgctttcttgtgcttcttcatgcttacctatggcgctacctggggtcctatcccttgggctatgccggctgagatcttcccctcttcgctacgtgctaagggtatggcatactccacaatgtcgaactggcttaacaacttcatcattgggcttatcactccgccgcttgtgcaaaacactgggtatggaacttatgcgttcttctgtgtgttttgcaccctgtcgtttgtttggacgtggttcttcgttccggagaccaacgggaaaactttggaggaaatggactcagtctttggggataacacttcgactgaggagatagcacagcgtgcgaggattgaggctacaatctgggcccatgctgccgcacggtctgatgggctcgaaggtacccagcaaattacttagatggctgactttgcttccatgtttctcgaagcagtgggtgtctgatttatttctgatttatttgtgttgcttatataggtatctatgagggcttgctctcatgttataatcttctttgtccactgtagattatgaagctccttttttcttccgattttctagagtatcctcgctaaatttcccaaagaaccggagacaggccaacgaccgaaatgcacgatgatctcttctatctgatataatggctgtctatgtaggtaggcttctcaatcatccaagccatacactgtcaggtcctggctcatcttaggaagcgcccaaacagcacactccttccctccgaaaaccttcaacttcctctgtccccgaaactcaagcccgatcttctccaacaccctcgcactgtgcgtatcatctttaccacagaatccaaaaaccgagtcaaccccgagttccctcttcgcatacgccagcaacgcaagcgcggcctcggtggcgtacccctttccagtctcctcgggcagaaacgcatatccaatgtcaggcaccagataagcattcggtggctcgcctctcatcaatgatacggtgccgataggggtactctcggccaaagacgcgtgcgcatgcggcttcagcgagaccaggaacatgccatagttgtttcgggcgtagtcggcgtgcacgcggtgccgaaggaaattggaggctttctctgccgtggtgatgctggtgcgaccgcatgttttcataaactcctctgtattccatagcttcatgaggaaaagacagtgctcggtagagtcggggaagaagtaggagatttggaggcgttcgctctcaattgagaacgtgggagatgcctcgaatagagagcccatatttgcttgtttcacgttcaagtgacgtagtagctgagttgtcacggaggtggtaattgattggtaagagtgagagttgtgacaattgagaaatttagcagtagcagggatgtggtattggttacagcagtaactggtgggtgcttgaaacagaaatttattcccatgtgatcgatgcggctgagagatagggcgttagcttaaaccagctgacctatcctgggatatccttgccttagatctatgtagtatcaattgtccaatcagactttgtaatacaaattagaaattctcgttatccgtcgggagtccgactggtaatactagtaaatactattttacgaatacaaaaacaacacaatgatttccgagcccttgcagaaggaggggtacgtcctatcctgaggtcatattccttatcgcaacacgttcatctcacattccaagatgctcaggtgttatcggagtggactcgatctgatcgggttcggttcgtgccgctatccgatatccccgcattctggtaatctaggtaatattaccatgaaatacggaataaaatacatcaacagtatcctgaggtctacgtatagtacgtgaggtattgatactgaaagaggctgaagatagaggtaaatgtgggtattggtaaaataagcctcgtattatttcaccgagtgtagatatcggtagaatactactgcagatcagactcctgtcttttagcagcctgccatttccgcaacgcgtcaaagtcaacgcattcatggattactccccatcccagcccgccagctgtcagctctggtgctgtccccggtggactagcaggttccagaactaggaaatcaccgcatgtgattgagaggcggagatattcaaagcagtggtcagtatgctctgtccaggccgctgaaattgcgtccgattcgttgacaggttgattggtttgagactcatagtggcgaaagcgccgtcgaacaacattctaacggacagtaaaggttagatttattgccattcctttcgtagaaactattgtgacttacgacacagtgaagttggtgaagatttgacaggacgtagaaccgctcatccgtattatccatgttcaaaggatcagaaataccctgggctaggccataatccgatggattttgcagccagacggaatcacctcctggggatcaaagttagttttattttgccatttatctggcgagatagccagcttaccgcttgtgatttctttccaggctttatcgacagcttcaccactgccatagtatttgttgtcggggacaaatgggatttttaatcgctgctcaaaaacctcgttgggtataggtgtctttagacgtagtcctggaacaaactcaggcgtcttgaagaatgaaacgctggtaaaacctaggacaattcctagcccaaagacgacggggagaagaataagatatgccctgtaaattcttctggatacatgagatcgaagtctggtgtcccctaacagagcctcactagaggtagctctgtcgtcatcgacatgttggtgtttctcgtcatgtacactcgtaagtgtataagctcgcgacatagtcgatgacagtatactttgcagcttcatttagctgtgattgaagatgtttatagtaaaattatagaacactttcagcgaaaaggaaaaaatttagaaaaattaagccgcaatgatcgaatgcgtcggcagagtgggaaatggatgttttctaggtgtccatcttcgaaatggtcagagattcctatctcaagacctgcatgtaatagcgcacaagggttctattgatctacactaacagggattactaggtgttacgcccaccccactgagcggaaagatcggtgagtattaccggcattcatcgtaatttgggtactacttatttcaaatatataactcgtgcgattagtctgatatgaggaatgtttcccaactcccataaaaatgtgagataggtagctagtgatccctagcttagtgcatgttaaggcacatttcaatcaatgaggaaattgtggactgaggagaggcagagtcgggacagctcatgtaacatcacgagaagagttgaagtagttggcctgaaaagggatcgcccctcacctcacatctatgtgcgcgctgcatcaacacgatgtttgattctcccgaaaggaggcgagaacacccgatggcaacacgggagtagttcagctcataggcttaatgcaaggtaacttgttgcctacatggccacataggatgtggttcgcgtgtactggggttgccccaggtcgattttataaatacttggcttcttgaccacctagaatgcatttcttcatcgacgtcaatatcgaacttcaaagtatcttcttcaaatacatctgaactctaagtctaagcctacgaattgtgagatcaatgctaccaagttaattttaaacccagtatacagagactaattatacatagtcttcaatatgaggtttatcatcgctcagacagttttggccgttaccttggctgcagtagccagtggtctggccatcaattccgaggccgcggagccggcttgggtttggtcttcggcttccaaacgcgggcctgaagaaaatgtaaagcccgaaattgcggagccggcctgggtttggtctcctaagcgtgatgccgaggagaatgcaaagcccgagccggcctgggtttggtcttctaagcgtgatgccgaggagaatgcaaagcccgagccagcctgggtctggtcttctaagcgtgatgccgaggagaatgcaaagcccgagccggcctgggtctggtcttcatccgccaagcgcgagactgaagagcaagtaaagcccgagccggcttgggtttggtcttcggcttccaagcgtgtagttgaagagcatgaggagattgcagcataagggcttcggccagctgaaacgatggaatgcttcaacagccagccacgagagacgaatccaacgaaaggatgaatttttgatgacaactaaagtgggatggtgctatgtacctagcttgctctatctttatttctgaattgactcccataaaacatttcggatgctgaacaaacctccaaacgtattagattaataatttctggaactacactcatttatagaccaacatgggacacagacaatgacagatgttcccacattacttagatgatctataccaattttagtagcaagtgactgtaatgtctcctaatagcaatatattagtaaaaagcagtaatttattaaaataagtcagcattttatctatctattttaggtaatccttagtataattatactagtgtagtactaaaactagtgctgcggtagtgctgcagcactatacaacagcaccaaaattggcttagtcccgcagtatctcgcagcaccatatcgcagcaccaaaattgccttggtgctgcgggacttgtcaagctctattcattttaaccaagaaaacccttgctgtaaacttgaatatgtcaattgaagcagagtaatagcaggtagaccgtgtctattggtgcagcgaccgcccaggtgtagaatttacgggacttatctggtagatatcagttgatttccagacagcataatagccttggataattcttgttaattgtatgatagagagagtaagatctatcgattagaagtatctctaaaaatagaggctattttatcctatgttcgagagactaatatgtgcaatgagaaaatcaataacnnnnnnnnnnnnnnnnnnnnnnnnnnnnnnnnnnnnnnnnnnnnnnnnnnnnnnnnnnnnnnnnnnnnnnnnnnnnnnnnnnnnnnnnnnnnnnnnnnnnnnnnnnnnnnnnnnnnnnnnnnnnnnnnnnnnnnnnnnnnnnnnnnnnnnnnnnnnnnnnnnnnnnnnnnnnnnnnnnnnnnnnnnnnnnnnnnnnnnnnnnnnnnnnnnnnnnnnnnnnnnnnnnnnnnnnnnnnnnnnnnnnnnnnnnnnnnnnnnnnnnnnnnnnnnnnnnntttggtcttctaagcgtgatgccgaggagaatgcaaagcccgagccagcctgggtctggtcttctaagcgtgatgccgaggagaatgcaaagcccgagccggcctgggtctggtcttcatccgccaagcgcgagactgaagagcaagtaaagcccgagccggcttgggtttggtcttcggcttccaagcgtgtagttgaagagcatgaggagattgcagcataagggcttcggccagctgaaacgatggaatgcttcaacagccagccacgagagacgaatccaacgaaaggatgaatttttgatgacaactaaagtgggatggtgctatgtacctagcttgctctatctttatttctgaattgactcccataaaacatttcggatgctgaacaaacctccaaacgtattagattaataatttctggaactacactcatttatagaccaacatgggacacagacaatgacagatgttcccacattacttagatgatctataccaattttagtagcaagtgactgtaatgtctcctaatagcaatatattagtaaaaagcagtaatttattaaaataagtcagcattttatctatctattttaggtaatccttagtataattatactagtgtagtactaaaactagtgctgcggtagtgctgcagcactatacaacagcaccaaaattggcttagtcccgcagtatctcgcagcaccatatcgcagcaccaaaattgccttggtgctgcgggacttgtcaagctctattcattttaaccaagaaaacccttgctgtaaacttgaatatgtcaattgaagcagagtaatagcaggtagaccgtgtctattggtgcagcgaccgcccaggtgtagaatttacgggacttatctggtagatatcagttgatttccagacagcataatagccttggataattcttgttaattgtatgatagagagagtaagatctatcgattagaagtatctctaaaaatagaggctattttatcctatgttcgagagactaatatgtgcaatgagaaaatcaatgaccttgtcatttctgaaaaaaaaagtccatggcgcctaaagcctgtatgagggactggtgtgcatttttctctctcttcaacttgcgacccaagcttagacggctttccaccacaatatctcagaacccagtcccactaattgaccaccagatatcaggggtattgtttagaattgctgtaacaaccggggcatcgagttgcgtgaagttgattttgaggggcggagagaagcatcctcggtgaggggaaaaaagggagggggggtttgaagatatttgaagggactggggagagacctaagggacttgaaagccattttcctcagaaggttgatatcggaggagtttggactctctagtactctcctgtcattccaatatagccgttcgtataaccctaaaacggagactattaccatacggcatgggcttctccatttagcccttctcggataatctgaacccatgtttactgtcgttctcttgaaacagtccacttctggttgcgctgtggggctctagtgctggccctggtagtaaacgcgggttcagactgtctaagaagggctaaatagaaaagcccttgctgggcggtaatagtctccgtttgggggttataaggacggtcatattggatgacaggagagaattggagagtccaaactcctccgatgtcaacctttctgaggaaaatggttttgtcgtaggtcgagagaaaggcgtgcttggtgttcagttccttcatataacgagaaacttggcctgtaagatagcataactattagtacacgaattcaccgcggataactagagtgtataccatacctagcctgcgacgaaatagttttccgtgtgcaatctcaaaatcctgcactcccatactcagcatatcacagtgtgcgccgggccatggggttttcactttcccaatgaccttgatggcagagacatcgttgagcatcaccatatctgggacccttgtgtaacccgctgctgcggccgcactggccttgaagtctgccgcccgtaggtggtgatgctgggcttgcagcgaagcggtgaccggccgtccaagccgctcgttcaaacggccttggaggccggtctcgtctccgaggacgagctgttcgacggacattgagttttctgctctcgggccaacaatgcgaacatcaagggtatcggtgctccaattggtgcttggcgaggagagggcggcaatgacttccctttcgaagtttggccatggcatcaactggcccacaaaatcgaccttgtggatggcgctgctgttggtatggttgggccctaccaggaggggcgggagagtctcgaggagaagttctcgggcagctagagtaatgatctgagccattgctttctcaattcgagtgcgttggtcaatagacgtgatgatttgatgagatgaatatgttactttcagtcgtaagtgctttgttcagatgataggatctcacaagctgcgaagtaatcagataagaaggccgagaaaccgatagagaggcaagtaaagaagtctgagagccagattggtgaataagaagtgaagcctaatgagctaatagagagacaagtagagaagctgagattgactgatcgagtagagagaagggaaaggctaagagactgatggagtagacaggtggagaagactaagactagagtaattgttgggattgtttgcacggggtgtattgtagagtaggtagctacatagtgtgctccttgagcttcctctactcccctgtcccagtactcgacagcaaacaagtcgtattgcccactcaccttgcacccctccctcgtagttctggcagtaatgagctaagatgatcaaaaggaacaatgtccaattacatgaagcaatgatcaaatcagactttccagtccgagatatcaccattgaaacttttgttccataggtaagatcgagggggcctagcaagatcaaaacgtggcaaccactctatgccgaaagtgcctttagccttgaaaccctctgcatcccggaaaccaacaaaataactgtagcaatacgttagtcgaactctcaatattataaacatgatgagcggcatacagagcaccggtatccgaattccagactagattccgagggcgggccccttcagggaaataccccatatgctgggccttcctaataatagtgattccatattagcattacccttggcaatagaaaggtgttcgactcacggaagctctcgaaggaaggcctcacggacacgctttcgttcctcacggtccatatcccagtacacaaaagcagatttgaaatctcctaggcgatctccagggaccttctcccatacaatccacgtaagatgccctctaggaactgcccctgacctactatcctgagacccttgcttgtatgctagtagtagaggtgtattttgcgagcatttatctttaagaaacttgtatgcctttagctcggggggtgtgaattcagtcgcttctcgggtgcgagtagctcggtccgcatcctcataacaggtgtgtggaacttgggcgtaaacgcgcataaaagcctcttgtccacctgcagcgttgtggcattcgaacagaacacatgcgtaagagtcgagagaccggtctgcgcattggtagctgtgcttattgaccagtctgtcgattacccattccgagcgggtgggcttgttgagggtgacctcgtcgcctggatcgagcccctcagggaaccatgaacgcgggacgtggtcgtcgtcgtccatgattaattcgataagagataaaagtgcgaaattatgagaaggtcagaaagcagaagaaaggtgagttggaaatgaagaaacttgatgaggaggatgaagagttgaaagtggaaacaaactatggtacttggtcacatgctctatttgcatatactgatgcgcacatacagattggtgtcaaaagcgtcaaccatactacggcaggttttagacgccatcgcgccaacccataataattttagagagttagagaattgattgagatttttctgccatatatatatttgccttactaccgtttttctgttagttataagcccagaatcgctttaaacttgactcttataaattttcacctttttatctgtcaggaccctagtactaagaaggctgatgcctgaggtattgcacctatcagggtgcgtggggaactgtggactaggcaggagccgtgtgtgctgcctgtacagccccctttaatcatatgacctacaatctgtatattatccttatatgctgcttctttagagaagtagctattagtttctaatataccactgcgtatactactgtctctatttcccgatcctccattacatacagcattcccttaggcattccatacctgggggtctcacagtatattagaactaatagctgcttctctaaagaagcagtatatgaggataatatataggttataggtcatataacccatagaggctgtgtaggcagcaatcattactcctgtctagtccacagtcccctacgtacccgggacgggtgcttccacgtaccatgacaggtatcatacttcaggcatcagccttcttagtactaggatcctgacactaagccgagtattctaagggaaataataatctaatgatattctatcgttagttcagctaaaggggttaatatagtagtcgcgcgactcgggtaattattaccccgattttcaccctaactatctatagcgtactcaccctactcacccctagtcgcgcgactgtaaagcagcgcttacccatttcttacccgggcgacacccacccaactattgactgtgtataagccatacgccggtgagttagtagttaggtgggtgactaccagcgaatcctcactgttatatgtttctacttttattttgctctttaaatcttatatagataaccaatgtagagttttagggaagcttttctttaccatacggatgtgttaatccatacagtcatagttcgattgggttccagatagtagcagataccaacaggccattgttcgctacagaaactctgccattgcgtccaggaagatcagattctctaatcggcgaatagcagtttagaagaatgctcaagattagaacaacctcgaaggagcagagcctggccttggcttcccatatcatccaaggaaatcatgctgccaggtcagattgaattttctttcctgttcaatctggaactgacgcaaaagttcgaagtcaatacagtcgtgctcgactccccatccagtaacggaagtagcatgtcctgtaaaagcattagacaagtgtatgacaataatgtatattggagagggttgactctaccttttccaactttgatcgggcttgacccttctattatgagatctcccccacacgaaattgcttgcctgaggtattcgaagcagtgcaggacatgtaaattccatttgactgcatcatgttcggtatcgaggtcgacaccgtcccgagcttgccaaaactgaaagcgaaccatattctgtgacttggagttagtcaaattctttaattagattacggacccaaacgtactagacagtgaagctggtgaaggatcgagatcacatagaaatcatgttgtggaggatcggtctcgtggggatgatcgaatggcgcgacgatgccctcgggcaaaccccatttgtcggggtcctcaatccagacagcatcatggcctataattatggagtgtgagtaagcaatgatgaaaaggaagtggtcgtcatctcaccagctaccaagtcatcccaatggtgatctacctctttcgaattcccaatgtacctctcatccggttgaaatacccttctaactggcttaaacacgtcttctggaataggggtaaatgtgccgagcggaaacttgccactgattttcggggcagtatatgacttccaatatagaactgcggtcgtagtccacccagttgcaaggattgagatgacaatgtataggagaagattccaatgcctatgatcttcaggcactggaagtgctgtatcttctccgtcattattgtttatttctcggtacttcgaatcggagcctcttggcttcaaaggccacatgttgtcagtcactgaaataaagccgagatcagagagaaagacaaaagagcggctcaaatgtttagagtcaaataaccacaagagttgcagcactatggtcaaagtgagagataatctttcgtaattgctccgctctcaaattgctacctagaattacatcctatatcctccgctaatcctgcatacctctctaatccagttgcatcaggcctcactgaagtaaggatagaaaataaacatagatagagaaattagagccctaccccgcgggccagatctgcaaatatccacatttgctaatatgaagagcatagaaaatgcacatggacccagctgagtaaccaggatatcagttcagccgatgcaaatacaatgccacctcatcctgcgatatgagtggtccatttgtaattatgtagggggctcgaaatgcagtcacttgcagtgttcgtagatatggccaaaggaggtatagaatgccaatctatgtactttggttaggttgtaatctagctcgttagggatgctacgacatgcatatatgtatgcccaggtggtatgcagaatgcaggtgggttcagctgaaagtgagttcatatatggcccaccttcattgagaaataaacagagccgcgtaattatgatcgtaattaattcactatctagaccagaactcatctttacttatttgttgcttgtttgaatatttaatacgctgtatgtactccgtacagagttatgatatcagcttactgccagtacgtacggtgcaagcgtatgaatcatgaatcataattaactaaaggtagaatattcattatgtactgcaataaataatatattcttgagacgttgagtacagacaaaactattatatgcaatgggatagatttcttgcaaagatattgctacatatacctcggatttcaagccgcgcttgatgaatttcccatcccttgccgccttttggtcgctgagaatcaagcacgcccaagtatcctgagctgcacgaggaagaaacagaaagaggctaccatgcgtccagggtaatatagatgcactaaatgggaccctatggtgtgcttccgttgcagtgtcgatcctgtcatatatacaaaataccgacctgtgtcgtctaggaggcaacctgaacaccaaggcgtggtacgtgagaaatacgaaacaaagacgcgaccccaagcgtaactaagcctttggacccctttaatgtttactgtgggtcgttagcgtgataacgtgatttacaagcgctttagggttgctacggataccgcggcttgggaaatgcaatcggggcaatacgttcaggcaagtgctcccatcctgtcaattgctgaactgtcaattgacttgtagggcaatatgcagttgctagtaacgagcgggacgggaacgaatccacttcagccatttgaaccaagaaaaggaatgctccaagtgacaagctaggcgttcgccccactaaagctagattaatttcaagctgtcctgtagtcgaacgcagaactatctgtacggttcaagcgcatttctggaatataagaaaagacgttgcagccgatcaccaccaaggcagaacggtaccgcaaggaatcggatgaatcacgggcagaggatatagtactaggagtgagttgtagatgtctgatatcttccttacgaaatacgatgctgtattatttacggccttaatttccaccctgataacccggtcttacgagaccctgccattgcaggacgcaaggaactagagaaaagtaccccgaaattgatttttaccgcatttagtacagcagatctcataggaatcttacacattctcaggtaacagacctaaaagagatagggaatttggccgagccaatagacttagctttgctcaatggccatgtccggcatgtggcccctcgtcaaaatcattcaggtcggcaggtgtatgcgtaagtctaccacctgtataccccgacccatgcactttattcgaccgatgctcgtacgcccaagaaaagatcttattgaaatcacggcattgatggacagctcccatgccgttgattcccacttcggacattggctcgaaagtagggtctgcatggcacatgagaacttgtcggatatagtcgaggcaatggtcgcggtggaaggcaacttcttcctcgtccatgtctttcacggataagggataataggcgaaccggagaaagttctatgcaagaggttagatattatatattgaacctgaattggctccataccagacagtgtagctggtggaagactgatacaccgtagaccaacgcagtctctggattatttggggcaggtagggactcgggaaggttctttgcagctgcaattggaagttccacgataccatcgccagctaataggtgattccgtcagtcgcgattctatttctcaagttggaatgaaaggatgcactcacggggagaaagtcgtttccatatctcgtctgtcttgtttgacggcggtccgccgaaataagagtgaggttggaaagtaacccggctggtatattgcactgtgatacaaagaactcttgatcagccggctcatttctctctacactctttctcaggagaagcttttgctcacagtcttcctcgaacttggttgtccacgagtcatcgcattgacattcctccgacttcctggcaaatgtgcctgtagcccacaggcctacagtggtaatgaatataagagcattgagggcgattagccaatttcgataattgcaaatctgccctccccaggatgaccgggaagattttctagagtagttccaagggtgaggaagtaatgttgagctcgaatcacttccacctgactcaataggaaggtccttgtctgactggaaatcatcatgagcggccattgcagatttgagggggggagataggacttgtcatcaaagttgaaagaatagatggatgggtattggatgaaggatattgatggtttcccaaaatatatatgtaagagaatatgcacgagacatcagaatgaattagacctacctaatcatcctacaagttgtccaatcacttgaaaccttttaatacagcccgtacatgaagtatatcagatttcaggcgctccatggtcttccctttccgttttagtgctcaccccttgccgcttttcgatcaggcccttgattattacgtaatcgataaacccgctgtaattttcaggtccggtatgattaaattaccgccaagagcgataactgaaaaatacagatatcgcgtcctagtggaattttcgtaaggaatgcccgggcgtttcaatctttacatctctcgcctttcgtttttcgcctttagtttgggtgatgtcatatccacgaccaggtggtaataaagtggggtgaaatcgccaaacgcgaatggcgaacatcatgcttacaagccctcgataggaaggaagagctgattgtcttattccgcgcatattctcaagtcaaacggtattccgtggcctcgcgaaacgtaaatgccaaggcgacttgagcacaatcgtaagtccatgctggcctagtcgacgttttagtctctgaaattaatgcggggtttatttcatctctaggctggtgagtcagtccactcgtaccctaattgttggcctttcaagccatttagacgataccatctcgcctttcgccctaaattgtttactgatttgactacccagccaaacttgcaggacaaggcgggtcaaatgttagtcttgcttacgtcgtctccagtcactgcgcgtgggctgattctgatacaacgaaaggcgacggaaaacgacccaaatgtaccccatgtcaccgcattgcgcgtgattgccattggcttcaggaaggaggcacaacagcagcgccggtagttccagtctaccaatcgagccctttgagcgcagctactccccatgaaaccgaatatacctccacggagcatcctgagtatgccttacaggacccacaagttgccaaattattccgccactacataacaaccttggccgcgtggtatgatctcaatgatagcaagcgccatttcaaggatgttgttcccgtcagggcgagatataatccgctattgctcagtgctattctcgcgtttgctgctgctaatcaacaccgcacccttggcgaagaagcgtatctggatattgctgaattctaccactatgatagtgtgcggagattgatctccctcacgaagaatatcgatagcattcctcttggcgaaacactcgccgccatttgtcttttgcgatcttatgaaattatcacacgttagtagttcccgacattcctaatttaagcttcctctgaaaatacagacgctaacagcttaataacaaccttagaaaacgtcagctctcagagtcacctgcaaggatgctattctctactagcgagtcagcgtatccatctcacagcagacctactcagcgcaggttattggaactacctccgagaagacatcacagtggctctcatagagcaacgcggtttaatgatcactctgtccaatcaaaatgccccagcagaaccaaccgaggatgcggactttgctagttccatcacattcctgctcggcaagattatcaaccggtgcctggcagtcgattcacaagcattagcccccctcgaatgggaagccatgaaatctgaactagacaagtggaaagcatcactcccgtcatatttcgacacgatacaaacccccgggctcgggaaacagagtagcttcccgtctatttggacactgcgaagctggcatagtgagtatactcgacctacttcttattcagcttctaacatggtaagcgtcgactctccattactaccataccgccatgggaattctatggttggctcagcctgcagctcaacccttgaaagctctacaacgcatcgacgatatggaatctatacagcggaagttagaataccacgcgacggagatttgtgccctggccctttcgagcgactccgcacccgtctgggtcaatgcttttggcccgattgcattctgtaagatttgtcaaacgttccctcgggctattctgatgaacgttgtgtatagattgcccttggcttcgcgatacccagaagcgcgtggaaatggcaggagagttggaaaagtgggggaagctgaccgggtggccggtttccattatagcggatgctctttctccgccaagcacaacctcgatgacactttagatctattaattatcacctttgtattctatggaaattctgtgggatggtagtgaaagagcttcataacactttatggtattcttatccacaaagtcaatatggatttcatctcattcttgtttgattgcgcataaagcagtttagatcaagatgaatttcaagactaccacctgtcctgtcgtttcgccatcaattaccagtagaataaacctcgcctaagggttctggttaaagtcgtaggcattgccaaagccgcggttcagatagcgcgacagtgcatccgacttgctgacccagtccacaggaacctccagctcagtctggccctcaataacaggcttgaggtcatccgcgaattcaagtctcatagggttgcgataccacggcgcaaagtggactatcgaagttagaaatactcagccggaggacagaacttcaacttactcattgccaacatgactcgggggtcctcggtctggttaccgactccagcatgccaaagacgaaggtctctgacgaccaaagcgccctttggaacgacgggctgacatggcgggcgctctacacggcgcttctctacctcgtcgagcttgatgcgaccactggcacggtcgccgtgttcgccctcttggagatgtagacctgtgtcattgtgtgttcccagccatacctcagtagagccattcgccggggtcatggtgatgagagggacattgatgacgtatgcaaatggatgaattggatgggcaaagtctgcgtctgtgtggataggctgggacattggagggttctctgcagttgggggcattgcagtatttcccgagcaaaaggtccattttgggcgtggtcccagtgctgatgtggtgatttgagttgcgatggggtctgagtaggattaggagctgtggactgaagtgcagttggggctttgtgacatactcatgaaaatactaggctcgaagaattccctcacgggaggagcgtcttgttggatatttcccaggttgtagttaaatgggatgtcctctttcttggactggaggtagtaggcatcttcgaccatctttttgttcagtcggttgaggcagtcgtggggaatcacattttcaacaacgacaagtccatcccggtgcaggctgcgcattgcaatctctagattctggtgtgaaagacgcccattcttgatttcatcttgtgatggacgaatggatttcggataacttgtgatcttcccgagttgggtcgctagagatcggatctgatagtgacggctcaacactgttggagccttgaagaggatttggctcatggtgatgaagtgatatgtactaggagaggggaatgtgaagacaatttcaagagatcatgaattatttatacatgtcaagtcagtttaacgagataaacattgcggagacggcctataaagatgtttgccccgctagtcttttcgcctttcctcgcctttcggtggtgccactttcgctcgtatgtatgcggagagtccgacttgccgagggtaaatcgattatattagcttttaaccatagccgtttcccctactttgccaatcgcaaaaccagttaaatagcctctcaaaatatcgcttcgctaaacggctcgcatttggtggattcgttcgcctttcgtcccattaggcgaaagcgcaggttcccttcaaccccgcacgcagcctgtttctatgactcctaactataaattgtagtaatttcctcttaaagtccagaaaatgacttctcaaccgaagctcctcccgcaattgacctccgccaagctcttcctcaccgaagctggactcgaaaccaccctgatctacaaaaagaacatccacctccccagcttctccgctctccccctcctcaatacagaagaaggcacagaaaccctcctcgccatctacaaagactatataaatatcgcgctcacgcactcaaccggcatcgtcctcgaaacacgaacatggcgcggctctccggcatggtcttccaaactcgacctttccgtcccgcagatcctcaatctgaaccgcgcggcagtgaaaatcctccgtgatctcagacccaagattgagacgccatctactccgatcgttatcagcgggacgctggggactctccgggatgcgtaccaggattccacggatacggtttctttctctcaggcgcaggagaattaccgcgcccaggttcgcattttcgctgaggaaggtgtagacatggtgtcgattatgactgcgacgaatctcaatgaggctactgcggcagttagtgtggcgcgtgagtataacctccctattctcgtctcgtttagtattgagattgatggacggctgcggggagggaggacgcttaaagatgcggtgcaggaagtcgatcgtcgcacggggaactatacgacgtatttcggtgtgaattgtgcacatccgcgtcatatcaggacggcattgcgagatgttcctgaggatgtgaggtcgaggattggggccattcgagggaatgcgagtcttaagagtcatgatgagcttgataactcgctagtgctggatcggggcgatgtttcggtgtgggctgaagagttcaatgggcttttggatatgttgcccgaactgaaagtcgttgggggttgttgtggcacggatgaagagcatattgagactcttgcgagagaaatttacaggtaattcctggttttaccgaatatttacatagctggatgtatagtattagatttatgaatagaattgcaaagaggagaattaaattcgtattccagctcacagcggaagaccatagatatcataataataataaagatcattcagcatacacaacatcattcaagagccacgctcaaagcagatctttgaagtatccacaaacaccaaaaagaaaatcgtaaaaagaacatcaaaatcaggcctcagccttggtctcgacactctcgtggtgcgtagcaatctcagccttcttctcattggcatcgatctcgagctgctcagtgaagttgacggaaggaacccagccaacagacttccaagcacgaggaatcttagcataaagctcatcgacctgctcaagcgaaagacccttagtctcgtagatgcaggtgtacacaaacacagcacagacgaagcagaatccaccccagatgaagaacaccttggactgaagattggcgtttccaggcccgctgttgaccatgtatggcgtggcgtaggcaatagcccagttgagcagccagttggtggcggtggtgatggagagacacttggcacgcgccttgagggggaagagttcaccagtcacgacccacgcaaccgggccccaggaacaggcgaagaagaagatgtagacacacacgaaggcgatgaggactttgttcgagatgtcggagtcggtggctgtgccgacgatcgcgacgatgagttgcgagacgcacattcccacggcaccgaacatgagaagagggcggcgaccccatttctcgaccatatagagaccggggaaggtggagatgacgttgatgatgttggtgatcagggtgatgacgaaggagttttggatgccggagttttggaagaaggtggtaccgtagtagactgtttttggttagtgctggaaaaggtggaatgggtgagaagggaacatacagatgaagttgacaccagtgagctgctgcagaccctggatggcacagccggttgcgagacgcttgccgatggatccacgaaggatctcgaggtaggtagcacttccgagacgcaattcgtattcgtggtttgcctggatctcggcgagctcagcgacaatggcgggatcattcacgtccatgcggcggagacgaccgagggacttgctggcttcctcgtagcggtcttgcttgatcaggaagcgaggggtttcggggaggatcagcatgccgacgacgaggatgatagcccaggcgaactgcacggcgacggggatgcggtagcagccggtatcatcacggtccttggtggagttgttgacgatggcagcgagaaggagaccaactgtgatggcgagttggtaggtgccgacaattgttccacggatccatttgggtgcggtctcggactggtagagggggattgttgcggagaggagaccgacgccaaaaccggcgaagaagcggccagctacgaagagagggatggaggttgctgcggtttggaggacaactccgaaacagaagacgaagctctccatcaccatacccattcgacgaccaaatctatcagcgacaggggcggcgcctagggcaccgaagaaagtgcctgccgagaggagagagacaatcattgatgattgtgcggcggtaacatcagggaggtgatccgtttcgttgatgaagccagtcgagaacatctctcgccatttcttcatggcgaggataccgctgatggtaccggtgtcatagctagatggtgttagacctgtcttcgagaagtatagaacttgagtggtacatacccaaagagaacaccaccgaatgcaacaaacagtccaatgatgatagccggggcagcagagcccacggcctcagtcggcctcttcaaagcgaagcccattgcgagtgtgatcacgaagaatcaagtcaacccaagtaggtatgtgtcgtgtgagtatatagatgaacccgaaagtatagatgactcagagaagactgatataggagagaaaggaggaagcaaggtacacaaacaaaagaagaaacccggaggtcaatccccctctatttgtacttccccagtctctcaaccacatggccccatgcttctcaagccggggaaattttcaaccaaacctgaaagcagcgcgggggaccgaacttgccttggaaggcgaaaatccgagtcctgtccaatcccagaacagcattccccccattgtcacggacttctcgatgttttgggcctggggatagagtttagaccgaaactggagaagctaacgtggttaggggctcaggccccggacttcaaccgggatggtcattggttcgacgcaaattggctcgtccccgaaccgagtttgatttttcttccctgagccttggcgtgcagttgttgtgctttgtgcagtaggatcggcgaaactacacggagatatagaagtacatggaatcagtatagtcttgctgtacatatctactgcatatggtgctctattgttactgtttgttgtatatcctattatgtatttgcgtggcaacttagggctgacatgtcttaggaatatccgtaaatagcctttccataccacacgacaggccgaaaacagcgggggggccgggttaagccaatgccgatcggtatcggcgtgtctcccgcatcgggggagaggccatgtttatttgtcacattttgctgcaattcctatgtcattttaatttagacatagttctggagcgtgttaaattagattgcaaatgtaatatgtagaaggtcagagatttcaattttcaaagcggatatttttcccccgtcttttcccctcatccccagacatcagtttccccagacctcccccagaccttgtatggagcaggggcccgaggtattgacgcccaataagctaagagttggcagttacgaagctgttcaccggagccagaatgggaagggggcaaagcatggccagattaatttcccccagagcatgaccttcgcgaggatctgcagaagccagaactcgccaaaattgccggggaaattttgaacaaatgcccagctggcttagtcccgcgccagtgcgccattttcccaagacgcggattggacagaggacccgaggctctcccgacgttacactcccggagaatcatcggagacacctgtggcctactactagctagatcggtattggactcggggataactttgccggtcaatgccaatgccggtggtttttagcgaggagtggcgcaggtcgggagctaaagtagcgttagctctaggccgttcgggttttgcctaggtcaatgctaaaaactgatcacatgttcgaaattagactaccgagtatgccaattcggcaggttccgatgaaatgcttgtctattattttgatgctcgctgaagaagaagaaaaaaaaaactggccagactagctaccagcgccagatcaggatgaaatacacagtcatcaccacttgcgccacaaatttgagggaatggtatagatcccggacgatgagagagacagttgagtgggaacgggtagccgaggcggggcgccatgcagccttgtcctttgaggcggctccgaagtccccgtctataccccgatatgcatcttctggggatttagtgccggggtagcgggtggaggctgtcatgccattgcggctggctaaaccacccgccgatgagagtgtagagctagatgcaccggaggtgtggtgatgtgggagagagcgcggttcggaaagggggagaatcgcaccggaagggcatggttctggggtgtagaggacgcggtagatggaacggaggaggaggatggagacactgatacacaggataatgaggtagtagatgaagattcccagctggtctgggaggatacagaggtggttttgcacagtgggtggtgatccgtcttggatggatttgcctgtcttggggtcgattggattccacagactggtaagcacgaaccccgggtggcggactcccatcgcccaggaaatgcttttgacggtgatttcattgggcgagccgttgaattcccgatgggacacttcacagtagtcatggtcgtcgccggaatacacctggacgacattgggtcctgccttggaaaccaattcggtggaaatggtctgcgtgaggacattctggtactgatagcctccggcaattctcaaagagttaggctcgtcctctgtcagttcctcgtccgatgaagacggcgggtagtgttctcggagaggaccacagggagtggctggttcgcggtagagcgggacgtgtgtcagaataatagtaggaaagccgacgcctgctggctgaggcttttggtggatggcgggctcgacagcgtcggcaatacgataatcgaagatagtatgctcctcggtcttgttctgcagcattcgcagctcgtccgtctccgccttggctttgtggatagccatcttatccaggaagtcatctgcatctttccagatcgggcggagagaatggttctcgctggctgttggagagctgcccgtcaatggatcgggctggtccatcgcgctcagcgagggactgtccacggacacgaaagtatgattcccaataacatcgacgcggttggggtttccaaaaaaggactcgaagcgatcacggacgggttcctggataccgttaccgaacccaagatcatggttgccaggtagactagcaatcattctgcgccctcgtccatcgacagggggcttcgcaaatttctcccacgggtccacaaaaattttaataaatcgcccaaactctttcttccaaaaggagtccgtatacttcttccaccgcggttcggggctgctagttgtagccgtggcccattctctgccgccgtcgaaaaggtcgccaagaaacagcactgagtccggctcgaggtgatcttgtatcaaggaaaatgaccgtcgcatatattggtcggtgtatttgaccgtcaacgtggacacaggccatggtcgaccggggtaagtgtggggatcaacgagctgggggtcggcgatgaaggcaatgtggtgaggtgtggcaccttgaggctagacattgatgttagtaccagccagggaactgaattgcgataggtattccgtcaacttacccattcttcccaactgtcccaaaggcatttgttgatgctgtcctcaaataccgtgcgttcgccccaccgaatcgagaacatccacagtaaaataatgacattggaaatcgtaaatatacgtttgacaaggttgatagcagtcggcttaattccctcacttcgaatactgccaattctccggctgacactctccgtaagccattgtcttgctgtcgagggaatgcagtcccacacgcgactgaggatattttgcgatctcgacgactgatgttggttgtaggacggaagggaggaagcgcccgtgctgcgtgggtaggcgaatttcatgtttggcttagcttgacagcaagactaagttaggatagggtggctcgaccccagacgagacggggctgatcttcaaacaaaggaatgactggtcatgctctgggcatacaactgaaaagaaccaaaagaatgaaggatgaaggatcaaaatagtaaaatttcataacatggtgttcaacttgaagacagggggattaactggcaattgttttaagcttcgggtcaatgtgtcgatcgccagacatggggcggtcacgtgtggacccttaacaaacagattgtctacaacatacggggtacaatataatttcggcacatttccaaggctgatttgcaggtcttgaattagagataagtagaagtacataacaaatgcagtccgaaggatacagcgggtcagcgggtctatgtccgcacattggatgatattgcacggcatgttttgccatgcatttcccaaaagactgtgtagctcaagggaactaccacttccaagtaaaaccagacaatgaaatgggaaaggagtaggacaggtctctagattctgcccgaacgaggtgcagataaagatagggtatctgggtaaaaaaaaaaccgtaggggtgagatgtttagggtaccaaatgagaaacgaaagtgcgtggaaagtcaccacatgggattaagttcactttttagggcaacactggcctccttcggcacagttgttgtcacactccagaaggcatgcttgagggtcgccctcccgaacactagcagcacgactgggaatgtggtcctcggtgtgagaggatgatccttgtccattgtcttcgacatcactttccggcgcgaactcaggttggatagtcgaagagtgaataccgtaagcatggagacagcgtctgacctgtctcgccagacgcatgtacctctccgagccttcacccttgatctcggtgtccacttggagatgaatcgaagccacgaccttggtgtcgctgagttgccaaacgtgcaggtggtgtgatccaatgacaccaggaaggcgctcaatgtcttctttgatgtgatcaatgctcatgccggggggcacggcttgaagaaggatacgcgaggcggccttacacaacggaatggcagatgcaagaatgatcactgtgataatgagagaaatgaccgggtcggcgtaaaagcgccacttgtagtccgtcaaccagatgataagcgcggaaacgatcacaccgatgtttccgagggcgtctcccataacatggaggaagacaccacgcatgttgaggtcgtggttgtgacccttcttttggccctttggcttaggctgggcatggttgtgggatttgtggacatcttcatcggggtgatggtggatcttggtaggagctccttcctcgtcggtgtagttggttgtgcgatcgcggtgactcaaaagacctgaacgctcagatggctgctcatcctcgtcatttccattgtccgaatccgacgattgttcattccggtattgactagccgcgataatcccttgtctcagtctctcggggagcacgggaatatcatcggcgctcacgaatccacgtcctgtcgaagtgctgtagctccttggcccgcgggtctggaggtcgcgccgttttcgggatgggtcagtgggagattgggtaagggcattttgaggcaagcttgcggctctgtccaaaaccttaggcgccgccaagctctcactgtgttcggcgatgggtgtgtgatcgtgatcatgatcaccagcctcgatgtcatggtcatggtcgtgctcatcgtgctcgccaccgttgccgtgatcgtggccgccaggtccgtgggagtggtcgtggaacagtgccaatccaacaatattggaggctagaccgaagcagccaacaatgcaaacaaagcgcgggttttgcacttcctggggctcgaacaatcgctgggtcgcctctaagaaaatcgacatgcacagggcgactaggaacacgccattgaccaaggcaccaagtgtctccgctcgttgccactgtatagagaaaccaattgtcagatcgtcatcgtcttcgggctagtattgacatcaacttacgccataggtgtaggtgttggagctcgtctcccggttcgcaaccttcacggcccataatccgacacatagggataagacatcattcaactattcgggttagattcagccaaagagcaagattgtagatggtggcgtaccatgtggaaggagtcggcgacaagggcaagagagtgcacggcataacctaggaaaacacagtcagaagccggtcgcatacggtcaaattgccaaaaactaaccagtgatcaattcaagcaagaaaaatgccgtatcaatgaccagcaggatcaagatcctgttcgttttggacaggcccatggtagcgtgaggtttgtggagcgctcaatcagagctccacgggataaaaagtgtaggtttataactgcagggcacagtgaatatttaaataaaaggaaaggaaagagggaacgacagagaattatagagaggaggggttgacgcgatgaaaaatacgtaaaagcgccggggatgaatcgaggccgtaaacggccagggcggaaacacctccggcctccggtctggtccgtggtggcgagactctttcaactttgcacttttattagtcggtcaatttcgcatcaacatgtctcagaagaagcgatgctttgattgagagtctttcgcttatttcgcatattcacagcttgaccccaaagagccccggggtccacctcccgtttacctgatcggcgggggactctctcattggaccggagcctcattattttcattgttgtggcttcccatctaatcctgagtcaagctcttctatcctctacctggtgactagctacatgtatacaccgttgccttacagacagtggatctatgtcctttgagctctgtgaacggacccattggaatagctgcattaggatatcggtatggtagcaccacactggaagttataaaagcaactggctcatgtgggactgatcactgcagctgcattgcacacgttatgggtatgctttgattcctcttctttcagcctatttacggagtatacggctaggtacgcagttcctaatgtacttatctgtactccttactcactgctaagcttttaggaaactctcacatcgggagctcgcataatttcaaagccctaactcatggtttccactattgcctagaactttcagcgctcttctatcggtggacacgtccggtacagcgtttgtttttttctttttttttgcaatatgaaacttagattagtgggggcccatgaagcagattttcaagactacgtagtacatattcacacgtcaggtataatttttaagtggcaggatagactgtgtttggttcacgctatatctacagacttatcatgctaggagatagtatcacaggagcaaaggagcagtagagtagaagcacaaatgtatactgacatgtgatggcgcttatcttcctagtgtttattacctctgtcgccaaactagtcatagaagctactcgacgctattagcaaactatgtggaaaccagcttcattacatgaattagaacgccaatcataacagtattctatatagaaaatcaaactacttgtaagttgctcctgctctgtactttgtactcagtacacattccactttcaatacgacgctggtccatctgtgtagcttgtctaggagaaagctccgcgccaattggtgcactatgttaggccaatgggattgtaaagcaataataaatggcatcgggtggtttgtatattgggttagtccgtaacggatacttaatctgcgggatgataggatatataatcgctgctagttattgtcacgtcagagcatatgtataaaatggtgaaattgatgtcagctagggaaaaataaacagcctatatttatgctagagtagttttgtatattcaaaagtaaagatagtccaattgcaacaataaatgttcctaatgagccctaatgagattgaatgtcaacattgaaagtgggtctgtcggtcctatctagctatccgcgatcgagcctactcggcataagtcccacaacagtaggccggctggcccaatggcaaggcgcttgacttcgaatcaagagattgcaggttcgacccctgcgtcggtcacttcttttttgtctttttggccctgagtggtggatggttgtgtatagtttttgtggaggcggtgatataagcggtaaggatatagcgataagagacaaaggaccgataactaggcattatacgcaggtcaaatgatatcaaaatgtactctgcactacatatatcaatgggaaaggagctgttctctaaggaccattataatggatattttatcagctcaagcggcaagtaagcctgcgatagtggagtatgatttttagttcgacgataaaccaggagaagttaggcagttaatttacatgagccacatgaatagagctagctatgcaagctgtagatcggagtgggaataaagttcttggtccctgacattgacaccatatgcaggttttagatggtgatcggcattcaaagccctacgcatggctggggcagtgcttacaattggaccattctcgacgctatttaaagacttcattgcgagaatacgaaacatatgacagaaatgtttttttatttacaatacaaccagatctatctaataacacacaaactctcacttatctaaaacttaataagcttcttgcgaagtgacgcaattctgttggttgcattagagaatgcacgcttgtccaacgaaccatccttcaaagcagcagccagagcatcgtaaatagcctctccctgagtgacattcctcccactggcaagcaagagatccataccagcctgagcagccaacaatccacggggaccctggtcgccaaatgccaccagcgatcccgcctcaatagcatcggtgatagtgacacccttgaagccaagtctaccgcgcagctcattctggataatggccttgctcagtccggaggggtaattggcgtccaaagcagggtagatagcccacgaggccatgaccatgtcgacaccggccgcgatcgccttcgtatacggggccatatccaccgagcggagctcctccttggtgaagtcaatggtgacgggctccacatcggtattctcggtcgtgcttgctccacccaggccggggaagtgcttgacggttgcgacaacaccgtcaccctgctgggcgtggatgaatgcagatccgcatgtcccaacgacgctggatgagttgctgaaggagcgctggtagttatcggcgaagtccccggccacgcggaacacatccaggacgggggccaggttggcgttgttatggaattccttgagggtggtcgcggcatcaatgcccatctgcgtcgcggccgctttgtaatcggcggcttcaccgactactttggcactcgacactggcccgccggacaaccgacgcacctctccgccttcctggtccgtcatgacgagcaaaggactgccggaatagtacgggctttgtttgtaggtctgctggagattgtcaattgtggtggtgaggttatcgctgacattctcgccgaagaggatgataccgccgactttgccttccttgatcagctcgaggagctgggcggagggctcaaggccggggtaagagtagatgacatgggatccaatttgcgcttggagatccgtcggggaagcagccaaagctgaaggcgcaagggcaaggaagaaaggaagaagagattgtgtgaacttcattttgattgtaggctggttaaactgtcaaaccgggtatcccttcattgtctatatatcatgtctcgctgtttatgaacacattgggaactccgattttgtcctatgattgccatgatagtccgaactgtccctgaatctgttgggaaattgcgaggggtgttacattgattagattgatcagcgtggactattaccacaaggggaaaccccgcatatgaaggttactatctgggagccgagatggccacgttttggcgttttggcatgattgcaacggtcctcggcacctaaggaatttatattgctttttatgtaacctggttcatcaaagatagttttgggactaggagagatatatttattggggaaaggaggccaaactgcaatcctaaccgagggttcgttgcctgaggtatccactctaacggataggcgtgataaggttccctagtttgcgattttgtgaagaacatgctgcgtacctgattgtaaccatagattgaattatggagtaagtcaaattaatctctcggccgaaattgaaaacaatggaatttgtcataggtggtgggcagtagcatttaagtagcgactatttccatctcaaagcacaattctcaaatgcggtttctttacggttttgaataagagttccctaggcgtgccaagaatctaactgcacgtgggaaatcttatttccataaataagcacttttcccctgggggcttcgaaggttatcaaggactggtacgggtacgaatagccgccatacatctcggaattaggtatatggcacttgccactgactaaatatgtttgatacccacgatcactaccgaatttgagataagcgaaggacataaaacaatattcgggatacatatcacaatagcaagcgccttgaggtccccatcactgacaaccgggcccaagttgtcttggaagaaagttatattaatttaatgttttgtaagtaggtttcagcagatcgaagtcaatattggatgcttggattggtttgacagaggatgaaagatattcactgttgatggagttggatggaacagtcgagtgagtggggtccaaggtggactgacgaggactgtgattgaaagtgcctattgacctgacagaaggaggggcaagaagactcaagtcctgagagtgtccttgtacaatggaatccaagaagcgacccaatttcgtaacctaacagacaaaactagaccacagtgtatcctttatcaagaatatgatcagccccgataacagaatagtgacctaaatagccctgacgtgtggacataacgaaggaacccccaaaactctatcgttcttaccccagatagccgagccgcatactccatcgccgatctcgcaggcatagtccgtcagtgaccaagatagagccaatggcaacgaatccagacctgtttaggctcatgcagatcgtccgagggtagtcgtgaccctgacatagagccatagtatgaactgttaaggaccagtcttcgcctatcctgtctcgcccgcccgaataaagtcaccgagtgtgtggtcaaccatgtactgcgtatcgtcaataacagccggagtaacttgctttagatgctgagccgatcggatgggtctctccatttctgactcaaagaggtaaaagcagttgcatcctgtgatcaacttgggaactgccggcagaacttcgacattttctggttctgtttccaacacgatgataaaatctccccaggattagacttccgtgataggtgtcaagtcgaaaatcaaacccactgctggttcatcgtcccaaatgttaatttctatcaattcgtgaacgactgaagtggtatatagggatcataggctctgtcgtggggatcgtccgtcaagtagcagggtacatgtgcactttgtcgagaccatggcttcggcggcagtttatgaaaacgataaattaatactcgcttgttgcactcaattgcccgtgcttttggaaatagttcgagaagaatttggtagctgcaggttcaaagaatttcttgggatattcccgaagatcaaacgtcgccattaccatctgccgagcgggtcgggtcgtaagggaagttggatttcgaaaccatcttgtgggggacttgtgtcaggaaggcctctctcgccttgggaggggtgatccttggactgtggctgccctgcataattgagggtggatctcccgcccattgctcctggttagtgaggtgggggaaggtgatcaagtccttcggtggattctggtgatggtatcatctttcatctcttgtttagaagctatggggtagctaactagttcagctgaccacatggtgatcacataactaccggatggtgacattaaatcacgtgcttcttctttatcttagactcggaacattattcacactgcatatgatatatcactttcggaactacagtgtacatatagtgcagaatcagttttttccatggcgtgaaacaaaaacgtggtacgtagctcggagcaacattggaggccacatggcagctgccgggtaatatctcaatggctcagtttctttgaaattctaggatctttggctgctagctactattctctaaacccagttggattatatgtcgtaatgaaccaattctacacgaagctcaagctgtaaggcccctgagatgctcaacgtggccgattatcagccccactcaccacttcccaaagaggaagctcaaagtagaagtcttggcgcggagattaagcactctaaccgacaaatcatcttgcttccctcgtgctaaaaattctagtggtattctagaaatgggtaacattgatcagatatgttgtacgcgattctgccaagcagctgaacccttaccacaactatcaaaattccaagtaccaaagtgcctaaagaggtatttctgtagtaatagtctccaaagaggggttctcgtatagctatagcgcgaggaacctttataggctgttcgaagacccttcgtgctatagcactacgataacgtcaattttagaagttgaattaggactatattaacaatttttaccggatatcgaggtaagaaacaaagattggccgttatgcaaataaccccctaacgaatggtagaattaccactaagaatttccattacggcgttgtaccccacaccccaatgacctcgggttgggttgcttggcaagagtcgcgtagactatttactgggtctattagtctgcacggagtacctggagggcgtcattgcttaaaaatttcaccacttggagacttggagggcgtcattgcttagaaatggccattgattcaccacctgggcatgggctataaagactttgcaacaccacgcatacaatgctgcactgccttataattcaacaccaagaaaagacatccgcatctgataaagaatcatgggcgcgccagaactttctagcccgactgatgaggctatacagcatgatccggagcaggccaggataaatcaagagaacgtcgatttggaaagattgggaagagagcgcccaaaatgctttggtggcgcttggtccgaaatctctttttgtctctcgatttttatgtcccaaattcttgcagtcagtcacgacgatgctcctggacaatgaggaaaaattctgacatttaccaggaatactacatctcaggctcaaatgtcctccttccaacgctcgtcagagagctggatctccctaaagcttcggcggtatggccgtctaccgcactgtcgctggtcgtgacctcgacgctccttatatttggcagactaaccgacatgttcggcggatatatcatctacagcgggggagctatctggctcacgatatcctctatcctatgtggtgtctcccaaacatggctgatgttgattatctgtcgagcgttgcagggctttgctctggccgcctttcttccatcgggaatgatgatcctcggcagcacgtacagacctggacccagaaaaaacatcgtttttagtatctatggcgcatgtgcggcgctgggcttctttgtggggattttcttctccggactcactggtgaatatctcacgtggagatggtacttcttcttcggagcaattctctccgccatcacatcagctctgtcactcttctccattccgcgcgattattccgagatgaggaaattgggcatccagatggattgggctggtgcgtgtctttccatcccggcggctgtgttcattgtttttgccattgcggacagttcatatgcgccgcaagggtggagaacgccatatatccctctgttcctcgctcttggacttattttcctcggaatgatggtctatgtggagggatgggtggtgaagaaccctttgctccccggtgatatttttcgagttaagtatatgctgcctctggtcgtcgctctgctatttctttatggcacattgggaatattcctactctatgccgttctgtagtaagttatatcctaatatcgttcagactgggcttttctgacaacagctatagcatgtctgatataatgggtgcttcgccaatgcaaatcgtggcatgggctgcgcctatgggaattggtggcctcatcctctcagttggaggaggaatgatcttccacaaagtcccaggaacgatattgatgctgatatcatgtctcggctacgtgggttctggattgttttttgccgttattcctcttggcggaaattactgggctttcgttttcccgtcgatgatatgcggcacagtcggcattgatatcagcttcaacatcgccaatgtatttatcacgacaaaccttccaaaatcaaggcaaggcttagctggtgcattgatcaactgcactctgcacatggggatcgctgtgctgcttggtttcgctgacattgttcagacccagacgtctgacctgggttctcggcgcagctacaaggctgtcttttggtatcaaaccggactagcgatactgggtcttcttatcgtcgcctttttcgtgcgaattcgagaggctaagagtgagtttacgcttgatgaaagagaagcaatggcagcagagggaaatgaaagagctggcgaggtcggggatgtttgataccctatgcatttgtattttttaaaaataatattagccctctatagaacaagacaagaccctcgtctgtgaaaatttcaaaacttcaatatcgagcacagtcgacatcgccattctatttatatagcagtgtatgggatctccgattggttaaccgaactacaatcacatgttcctgaaagctcacgtgacataactctgtagccttggcgtgcatggtgcatggccctggcagcaatccgtggtgacacttgatgatctttgagacctctagtctccgtgctctactcgccattcccggagcctagaaatatagatcacaatgcgcccttttgattccggatgacgagtgagattcatgacaatgtcagtcacaacaattccacttgaacctttcatatcgaccgcacgtgcggaaacgagtcacgccgacgcagtcatgcgagacctccaatccgaccgaataaaaccggagaagaaagagaacgtgggattgatggtcggcaatagtatagctgcgtcggccatggatttcactgggacatcatcgtttagggaaaaaaaacgttcgtccggccttaatttcctgactgcagaacacccgcttttcccacccatgccctcgtatgggccaccatccgcattgcgcagggtccaatactatgcgttcatcgttgcttcattctttctgtcgatatgcttcttgacggtcatattcatcggggccctgatccacacagccggagtcgcaatttcggaagctcgtctgcgattgagcggccataacccggagaccatgaggtcgttctatacagaggaacaggcgcgcaggaaggcacgggcaaacgtcgataggagatgggctctgcgccaacagaagagggacatggacgaggaacagggacccgaagaatgccaagaatgcccgtcgttggaaggaggcaaggaccctctggttggcgatgtcgcatactatgcccgccgagttggtcttgatgtggagacatttcgtgtgcagacagaggatggtttcatcatcactctgtggcatgtgtacaatccccgggagtatgaggcattatcaccagaagagcggcgtgagcgtggtcccgatgttttcaccaagccaagattgtcgagcacatctcgtccacaatctaaccgtcggtatcctgttctcctgatacatggattgctgcagaacgctggcgcattctgtaccaatgacgaggatagtctggcattttacctctgcaagtccgggtacgatgtttggttagggaataaccgctgtggatcgcacccagagcacaccactttgtcgaccgacgacccgcgtatgtggtcatgggacattcggcatctcgggacactggatctcgcagcactcacgtcgcgtgtgctctacgagactgggttcgagaagctaggtctagtgtgccactcccaaggaaccacgcagaccttcgttgctctagccaaggagcatcgtcctgagctgggtgaatacatctcggttttctgcgcgcttgcacccgctgcatatgcaggcccgcttgtaagcagaccgtatttccgattcatgagtcttctctctccggcgatgttccgaattgtcttcggaattcactctttcattccttccatgatgaccgctcggcgcctgctcccgcctaggatatatggaaccctagcatactgggtgttctcctttttgtttgactggtcagacacgcgctgggagcgtgatcttcgccatcgaatgttccaattcgctcctgtgtatgttagcgccgagatgatgcgctggtggctgggaagcgacagctttgcgaaacataaatgcattttgtccacagataacgaactccttcaggagccaaacgtgaacccgcatacgcgagatgctgtttctgagcatggtgatgatcccagagacgcatgtttgggcccggcctcaagcccctggtatggcccgaggacacccccgtttgctttctggatcggaggctctgatgctcttgttgatggtcgccggcttctgaatcgctttcaaagtggctgcgagcctcatgtgagtctcgttcattcaaagatcattgaagaatatgaacatctcgatgtcctttgggcgatggatgcgatcgatcaggttggcagggaggtcaacaaggtcatttggacaaccatgcctgatgacgcacgtcagatatgtcgcactccgcgtggtttaaccctagacatggtagacagaggttagcttatatttgtttaggcattcatatattctacttcataaagagggctttcagctcaacaacacttcttgtttattcctatgggacactattactgggaaaacatattttacagagaaggactttcttagtatgaatgcgaatatgaagaatgcgcttattgcgttcatttattcctttttgaggcctgattcaacttggcagacccaggtcttcaggcaccgttcaaagatcacctcgatcgggtcgcaattcaagatatcaggcgcatcctggagagcacggcgcagattcgcccgcccgtattcagccatgttctcatagacctcccaccgagtcttatcacccaagacggcctccttcaacattggggtaagcggatgcagggggtcgtccgggcggcgagacagcgatttgacccaatcggtgtaggagaccccacgcagcggataccgcgaaatccgtttgaggatctcgaaactagtgttaatgtcgatcgcgtttgtcagatcgggctgaatgagattataggcatggccgaagttgttgtgcgaggtggaaatgtggagtatggcgttgacgatgaagtctacaggaatgaactccttgcgctggttaggcagaatagggaataatcccagagatatacagctagtgaacagacgagaaacaaaatcgtccgggttgcagaggcctgatttgctgtgaccgagaacgaagcccggccgatagatggacacagggaagccgttgtcgatggcactccaaacgatcatttcagccacatactgactctgggaatagccggtatcatactgcatagcggccaaatgtggtgccgggcgctcgtcctccggcaacatagtggccccagtcacatagcccgtcggcccgtacgcggcgatactggaggaatagtgcatggccttgagacgctgatgcttggcgaattctagcatgaacagtgtccctatgacgtttacctggcggtgacttgaatacggagccacgtaactgaccttggctcccaggtggaagacaacactcgcccaggatgcccagtggtcgtattgggtcgtgtcaagcccgagtttagcaagagagaaatcaccagggactgcaatgacctttcggaggtccagaaacagcccgtactttccccccgtctcctgaatacggcgcagggcagttgtctcgtcctgcgcccgcaccaggcacgcaacttgcacaacctctggccgcttcaccagagcgtctaacagaaatattccgatgaacccggtagctcccgtaaggaagacccggccctcatcggggctctgccaatggggtattgtagtgtcttgtggcctcaggaactggcccagctgggcatcttgcagccatatttcctgctcggactgggccgacagatcgtccccattcaattgcagccgcgtcaccagttggactaactgctcgaatgtcgagttctcatacaacatgcgagcctgcatcgaaaccccgagcgcttggttgatgcgggtgatcatcatgacagccacgatggaactgcctccaagggctacaaaatcggcggtgggtaccagatgctccgccggtaagctgcagacatctagccaaatgcgctccacctggacagctacatcatccgaatcaatctcgagggctgcggcaaaatcccgcgagcgctcaatctgctcgtaccactggcgctccagtgctctgcgatccgccttgccggtcgagctcaagggcaggtcgctgattagttggatgcgcggcaccatcagatgaggaaattggctgatgtaggctcggaggatcgctccttctgtggactcatgtgtggtaggaatgcagaaagccagcagaaactggcctctttcgacttcatccggggtgatcttgattactactgccgcactaaccagccgggtctctagtaggctcgcctcgagggcctcgagctcgacccgttggccgcggatcttgacttgattgtcttttcgaccgaggtagaagtgcactccattctcatcagtccgcataaggtctcctgtcctgtacacatggccaatacctcgagtggtctgactcttgagttgaggcattgtcacgaaggactgggcagtcttctcggggttgccaatgtagccacgagctacaccaggcccgcctaccagcagttcgcccacttctcccggctgagccaaatgtcccttctcattaactaggaaggtctccaagtttccgatcggcttaccgaccggaatttcgccacgcagagcttcgttctgactaataacatgccaaagagtgtagatgctgcattccgtgggaccgtagccgttaatgatgcgtcttggggccccgttatcgaagattaaccgtattatatcgcaattaatcgcctctccgccggtaagaagtgtatctagtgtggaaaaggcatccgaacaggcgaatgcagtgactgtgaggagagaagtggtgagctgtagcacattgagcttctcagtcttcacgaaggctcgcagagccatcgggtcaagcaccgtctctgccgggatgaccaccacggtggctccacggaggagagtggtccaaatctcgaccagagcgctgtcaaaatggacgctcgcgccatggccaacccgttgaccgtgacgaacgaaatcgctcgaatcaaagctgagattgatcagcccttccgccattgagtccacggccttgggcttgcctgtcgtgcccgaggtatgcagtatgtgagaagaagtccaagcactgcgaaagacgggatggaagctatccacagccatcagagggaccttgctatgatcgactagggtgtggcgaaaagttggcaatcggtgctggtgcgttgcattggtgaggaccagggccgatttcaggttctcgagcatgctggccaaatgactgtcgggaagtttctcatcgagaggaacacaaactcgaccggcatatatgacggcaacttgacccaggacgtgattgagcccccgagggatgataatgcctaccggcgatgtatctcctggattgcccgcctgaatctggattgccagtgcgagggccttttgatgtaactcggcataggagagccgatccgtggaatcctggatggcggttaccgctccatttttgcggatttgttgctgcaagagaccagccagacccataccctccgggctagtcctgccaccacaatgttggataggaaagactggcgtggtatattcggatacgctacttccatgagccagagctccgggtcgaataatgtcaatgcttttatcgtacatggtgataagtgtagctgtgaaaaaggatgtggtatgaagtagagatatttgttataggtatgtcctatgaggatatggacaatagcagtatattgatagctcctgtaatgctccatcatgcctctcctatttatacttgctcagaccactacttctggaatgtcgtgctttatttttatacggaactgtaattcctagagacgtatgaggcttttacttcggactgacagagtgacatctgtcttatccaattgaagctccgacaagaaccggattttatatccctattgcattctatacgcccgggccaggacttcgcatacgcgggctatgctttggactgttgtgctacctacacactgctgatctccccaaaccccatctgcatctccaaatatgacgtcgtaattttgcctcttgtctatatcaataatcaataatggctgtctcttctcgaccctgtgatgcgtagagggtggcgcttcgagaccaccagcacggatcctcagggatgatagacaagctccaataagtccaagcctatcatgctgaagcatcaacgtggctgagcatcccggagataaccctgggagggtccgcagcagtagcagtgacatgagttcgatcccagagtcgcacgaatcccaggggcaagtattatccacgaagtatgatcctaatcaggccgacctgatgactagacctagatctcaatatctctgtacatgcagacttggacatgcctcctggcacagtacgcttagtggaagaagccggcatccaggttccggccggaggaggtcccgacgaagaaaatgagaaatgcctgcacagatcccatttaggaagggctgatggtaaaactccgagttcggagtggttgtaagtttgggggtcccctcgcgaaacttcgagctcgaaacaatcaatgactttccttggccgatcacttgcatatgatccgggagatcatggccccggacgtctctaggattgcgcgatctgacatcttcatccagtagaatcacagattgcgagattttgatattggcttcctcccgtatactcactgtatttcttccgatcccaagcggcgactgatcgtctccctgggcgagggctgcgggatttccaaggctgtagacccgtgggaacaagtacttttgtaaaatccatgaccaatcaagaatttttggtccttgagctgatgtcccctgagccattttttccctttcggaacattttgcctgtgttcagctgcattgcattatggtaatggggcacgcatgacagatcaatatgacatcaaatatagttgcttcaggctcggttcgataagcattgaaaccaatattaaaggacgattgattgctaagcggtttgtatgaaaggttgagatactttcttaggggtgctgggatctgagaccttgtagagggcacaggaaatttgacgtactgggctcagtctctcgtttggttttttgttgagtcaagtttgtgaccgcccttacccttgccctaatacctattttggtcaggtacaggtacatgtcaggtgatgtatacttgcatgaggctttcctgttaccaaggatcgggcgatgaagtatccgttcttcaattgctatccttgcggatggcagcaaaagctatcaatctttctctactgacattgagaggtgagatcagcccagcgcaactgtcccgtcgaaagctgaaggacttcagtccaagtcaatctaagctcagccaggcccactaaccccgcaatcccccggatttgggtgggaccgggccaaatcctccggactccacaacattccacttccatcggattatcataacacatatatgcacatggcaataatgaaagcagatataaggctatagatactatattcccatttagtatcatatctatgttgcattccaggggaacccgcctatagcaggatgatcatctcacccgaacagccccctatttgtctgtgtgtcacaatatacacagctgtgagtagttgagggtacacaggtacttacattgccctggtatacatgtatccgtagtacttttggtcaagccgtgatgccaaacctgaccaatcccatatagtcaaggccaatcaagaccgcttcgacacaacagggctaatgtggtggagagggctaatgcggccccattatgatcgactgggacttcccactatcaattgctagagtgttttcagtattcctatgtgtcgagtctcttcaatattcacagatatgtaattcgaggtagatatcatgaccatgacatccacttaaaccacagggagacaaatgtatcctgaaacatttgacgactccaaggttatgtgacgcatcgcgaccattggcttgccaccgtacagggatgtcctagatgtcacttttcactcagtcctaagtcctgattgactcccaaccccgcattcagtcagatgatgacagtgtatataatctctttcatgtcgctcgcactgcttgtgtactttctcttcttctcaagaaactctcctctccatcacacttacagcaacaacttgacctttccatcaacactctatcctacacactacatccaagatgtcggcagccatgggtcctattatgcagcagctgcaggctctccctgcccgctcgaggcagggtctgaataacctacgccagcgtatcttccagcagggtatgtccttaccccttgtcttccgaccgtctcattaaccttactcctgatattcggatactaacactgttcaaaggagagagacaacccagagaagccaacctcctgcgcacctccctcaatgttcaccgtcccgtttggatcactgctggcggcggtctgtacaccagcatggcagcggtctatctcacgatgcgatatctgaagcgtgttgctaggtagatggaccagtccagttatctgcctgttcgagtcacttatactcgactgcatgattctacaactcccacacatgttttccactactcttcacatacataccccttttattcctcacccccatgtatctattgacaaccaccgtgtctgctcattagatggggggattcttcaggtcccaggttgggctattctttcttttattcggtcggccgttggtatcctcgtcacaggatggcaagatagacctggcatttctgtttcaagggctactttaccctaaatcaatactattacgatgaacatattataagtaaactaggcctgcctagccccagccacggagcgatatgcgcctttgaattatgagtgtgtaaatcgagcgaaatccatatatttttctagcaaggtacacacatcgaaagtcgctatatgaatacccaaaagtaaacctccccctaaaatccgaggttctgtgccagtacaagtaagcaagtcaaagtatgtcgcaaaacccgagaagtgacagatccactcggctgaagaatccccagcttttgagatgctccacttcaccatcaaaggaaccaggagtgcgctcggcccatcgcttccaccatacacgaatgagacctcaggcagacactttgtaaatagcctactggcctatcatacctcctctcttactcagagcatcctcacttcgctgggatgagctcattgcggatgggtgcatgcgttattttttgcctaggggcttggcgaccccgcgtttgtgtgaattgggtgggttgacagggcaaaatgagtgtatgctcatattttcaggtagagcggatggctatctgcaagtataaatccatttttgggaaggttatgtgataaagagcttcgcgaaaggattgtctggagcgttgtgtttctggtcttcttgaacttgatgttgtttcttccgttggaaaaagggtgagacacgattggatcacttattctctaagtaaaattagtcatccgagcactgggtctcatcaaatggctcctaatcgttcctagtccacgtagatgtgtatcacttgcttgatctgctaagagaacatgaacatgtcattctctgactctaagtgctctggggagaagcagccatgatttgaatcaaatatgtttcttttcatatgtctcaaagatcaagcatgtatatacacccccgccggagtcccgccggaattgccaagctttctttcaacctctagtgggaaccttaaatgtcggactaatgtactgtcttcctttatccaaaatgcaaactcaacattatgcacacctccttaagagctatgcggtatgtcttcgcggaggttctgctcaaagcactcgtcccctgcagtcctgtcttcaggtacgttcttcccggtccggtgtcgaatgaatttaaaatgtctccgcgcaggtgtaccgaggcaatatgatggaatttacggcgtcttgtatcatgtctatgctaacacaagcacatacgaccatagggtgtggaaaacagggcttcccgtccgctcagccgtacttaagccacacgccggtgagttagtagttgggtgggtgaccaccagcgaatcctcactgttgtatgtttttgtctttttgcttatcatctattgtaataatgggtagatgttggggttttactggattggctatgtatccattttggcaagtaaagttgcaggtggagggaaggttctttttgggtatacatcccagggatatcaggaaaaggaatcgatatgtgtaaattaaataattaaatgaaaatagaaaatagagggccttgagaaaataagattgaagggggttcctttcttatcagtctttccttgcaacggcagcggcaacaaccaatggggtggcctctagctggagcaactcgatcagctttctgtccatgtcatatctttcagagatcggtggcaatatatctttttgtgttgacgctgagttcggggagttagggtctgactgccgagaggatcccgaggatcggaaccacattccgggctcctccaattcggagattctagtggggatagccctaggctgcccgagaccgcggagttagggagaaatgctatactgtgcttccttgcgtcctatgacaagttggctcgagtttataaatgtagagaacgccaatgccgcagagtgacagattatggtaatgtatttgcaagtatgtgagaggtaggaaatccaattgttctgatgccattggtaacatagcaaaagagcacatcttcgtatgtaaatccgttcatgtaactaagtgaccttcatgattggtagctgagggtaaccgtacccgggaagaccaatcccccagtcgagcccctcggctttctaattgagagcattgaggatctctacaacagtacagcgatcacttactatctgtttaccagtgcggagatcatagtatcaatgtcgtcttctggggcaccaacagccaaaagacaaagggtgaatttggcctgtaggtcatgtcgacaaaggaagtcacgggtgagtattccgctaatcctacactcgctcaacttcttccgcatatattacattctacatgccaataaaaattgggatcaaatcatgaactaaccattttccccccgcaaagtgtagtggcgaccggccctgtatcttatgccaagagctaggtttcgagtgtgtttttcccgaaggtggtacaccaaacaacttgactgtcgggaaaaggtatctatctgtttgttgtattgttctttgcaaatttttttttatattcaatacattcccggtagtgtaaactccaaaagatcctaacaacgtctgcagctatatcttacagctcgaaacccgacttgaagtcatcgaaaagtccctccaacaattacaaaaaactcaaacacccagcatacaacctcctagagattgtcatatccccatgagcgacacgtgtgtgactgacaatttacaccctacacaaagactgcagtctgacgccgacacacttgaaccttccggtcagacttcggctgagtttggggatattgacaattcccaaaattcgatagatggaatgggcgcgatcaaattcacagatgaaaaagattgtgggttctttggtatgcgcctcgctacatcacaattcgagtgtgaaactgaaatcttcagggccttcgtctaatatctcttttttgcaatacatttcccaagcggtggcaacagtaaattctcagggcagatccatctttgctacatctccattagaacaaaggcgacggggcatagtgaatgtttctaagcctgtgttttgtcctgccggttctactgacttggaattaaccacctttattccaggacgagtggacatgtatgcattgccatcggaggaacgcacttgggatttgatccagcaatttttccagaaaacggggcagcttctgccattcatccacgaaagctcattctgtgagacatatcgtcagatgaagagagaaaattccaaaggagttcgcaggacctggctcggcttgctcaacatcatactcgctatctcaacgagtttgtcggcgaaggataatatcccggcggaaatccgcatacaacaatccgacatctactaccaaagggccaatagcctttgcgacagagaatctagacgcaatgcaagcctggagatgggtacgtggaaatcccaaaatcgcacgtttaacagccaacctggatgttctaacatttagtcataaagtgcaatacctgcttattctaggccagtatctccaaggaactcagaaatctgttcaagcatggacgacacatggtttggccatctctgttgcgtaccagctcgggttgcactcgccacatgcaaaccaaggattctcttctttggagtgtgagattcgcaaacgaacttggtttggttgtatacttcttgatcggtgagaaactactctatagtaatggtggatgtaaattaaccgcgagcttcttagttcccttagtatgacttttggacgtccttgcactattccggagtcatacgtcaaattgaaaatgccttctgctgacatgcagatactgacttcgaccatcgaggcgagaaattcctctcagttggacggtcttttcttcacagccgccatgtaggccacgtcaccctttctatcagtgttgtgtttactgatgttcgagaagacagttatacagcattatgttcagcgtcttggattcttgttatggccagaaccttgggtttgaggctcctttcaacgctgccgagtcaacctcgtgtctcctgaaatgccaacttcagttgaacagctggcgtcttcaattgctgccatcattaggattccaagtttgggacggtccgatggaagcggatgacgtggagaagatgggggaagactctatactgaaacaccgattcaacatcgttctctctatgcgctacaacaacctcaaaatactgcttcatcgtcgccgtctagaaagttttatggaaacctccccagctgctgaacctataacaagtcaggacatgaaactacttggccagatggatctcggcagtgttgaaagctgcatttagtccgccatatcgatcatttctacagtacatagaatcttgacctccaacgcctggcggcgcgagcttctgggcgcatggaactattccctctattacagtaagtcaccatcttgcctctgacttaggttgccctctttggcacaagtctcattctcacacggttttcatggggatttgtagcatttaatgcggcactggtcatttttgggtcacttattgtggctctcaaaaagcgcgaatatgatatgacaccatggaatgttgttggccattctcgaccttataccgatcgagcgattgatgcgctccgccgacttgattctggcaaccgcgttgtcggaagttgtgtggaatacctttcccatctttcgttggtccttagtgctctgggtaagttgaaactctgcatacctagctacgcactcactcttgccctgacaacctgacttatttttcttttttcttttttcttttttgattttacttctgttcagttggctacgtgttctgtttgcgttggagaatcataatgctgaccgattgcacctccatagaaatggacgattcggattccaacacctgctggaattcaaatttttctgctggattttcagccgatgttttcagctcgcaatatggagcgacgtcggcttccatggatttgggtgaatttatgacaggtcaggattgggggttcctcagtactctctttaaccagtcgcacaacgacactaccagtgcccctcaatagagaaattccatatgtatcagatttgtattatgtttattcctatgctggaagctgaattagccatggtagcaccccggaagtctatcctatatgcccctctggctcttcaccgaggcttttgcaactctctatagatcagatcattcaagtatgtacgtactactggccggtagcggtggcgaagtggtaagcaccccgaaggcaacatgcagaatgacgaattggtctaaggttctaatcccatgtgcgcggtgtgtgtatacccctggcgcttacttagcgagtacgtcgagctatacgggctagttgggcaggtgaccctcggggtcgtaatagttactgagggtcattatcgcttcgaaaacccattgagccagtcagaaagtttaaaggttccgagtaggtaactgaaaaattgccgcataaagattcggtggcattccaaatactttcaaaagtcctgagaaaaaccgtatccatcagcgggccgttcaaaagccgagagagacagcaagatcggttttcggattctgttccgacggggagatacggctggtctcatacgggagccaagaagctcaggtggatcagccactgtcaactttggcattaaccaacagaagttctataacacgataaaaaggcatctgattcgcaattcacaaggtctgtatcgacaattatcacgaagaaagctcgcatcatgtcgactctcagtccacctgccactaccatttcggatgctgttaccgtgtacgaccttattgtagttggctctggtttcgctgtaagcttgacaaataagcggatcgagacgacatggctaatgatgattctcgtgataatgttaggggtgtatgactgctctcaacttcctcgaagataccaagacccaaggaaaggcagcgaaactcgccttgatcgaggccggtaaagatggagaacgatgtggtgccagcaggtagaaccttccgagttctagtgataattgagacgtatgtgtgctgaccagattcattcagatggacaccggccttctttcggttggacaagagtgtgttgcaagataattgcaaattgaagtacaacttactaaagactgtgcagataacaggtttgatagcggcttcaaggatgagatgaaggtaagtggcaggccaatgacttttatattccttgcgactgactatagtctagctcgtcaggtaagcgttctagtcagcccgaagatcgcactttttaattgtggcagtaatggacttgccgatcaggcatactgcgagaaattggaagccgaagttcccactacagtgaagtttcttttggaccgtaaacagattcggaagctttcaatttactcggactgacactgacattataaggtagacggaatcatagtccaacatcaagatgagagaaatgtctacctcggatttaataccggtaagccctttgagaaatccaatttcaggctatgccaaatgctaatgaacttctagaccagaacttcgccaaaggagacgtacgcatcctaaaatgacttttataccagccaatatctaatcactacaaatagggtggcggatatgccataatcctcaagcttttcgagcacatactgtcgttccctcaggtggacattatgtgggagacaaatgcggaggaacttctgactcatggcgatggtaccattcgtggtgtcaaggttcgaaagaacgacggccgctttgacaatgtgtttggtgagcaagtcatgctatcatgtggtggcttcgagggtaatcgcgaaatgtgagtgtgatcaggacttattcgatatgatatgaatctaaaaagtatggaaggctgggccgatacgtcggacctagagctgaccaacttgggttggtagcccctggtctcaagtataatacggggtttgggctcaagatgggcttacaagtcggtgccgcaacggccggctctttccatggcctgcacgtaagttacgcaaatgaagatcttatgagattcactaacccgtcgcagtgtgaacttgttgatactcgctcctcaaagccagaggcaactgtctggggccatagcttcggtatcgtcgtcaacgagtatgctctaatcatttaaatgaaatgagggataaaggctcacattaccttctttagacactccaagcgattttacgatgaagggaatcgatcgtatgttcggcctccagcttgtactagtatcaaactgacaaatgcagcctcttcgctacttgcgaagttattgcttatgagacatggcgcggtaagtaatgaggtaggtcgaaggcgaacatgcaccgctaacgtgtatctcagaccaaaaccaaaaagcatatttgtgagtcagacaaacctatattataaacggtatatggctaaaacgcctccaagtgttaccgatgctcccattatggaccgattccgacctggttgggtttatgatacaactgatctggacccagagaaaggcgagacgatcgaagatctcgccaaaaaactcggtctcgttccccaagaactgaagaagacggtggatgaatataatgcttcgtaagtcagctagcaggaatgtcagagtctcacactaatggctggtggcagaattaatgacaaagaattcaaccctttggttcttgacggcaagagcaccttcggcctaactcctaacaagaccaactgggccgcaccgatcaaagtggctcctttctatgggtaatgctcccctcaaatcatataatctgcttagataccactgttactgatgggtatctaggtatcctctgactgcaaaggttgtattcacttttggaggactgaaggtcgatcttgagtcccgtgtgctctccacgacgggtaccccaattccaggtatgatttctaatatttccttatcacagcaaaatccatcagaccttcgcacaaacacgctaaacttacatcttgcgatcatttcctcactgacacgtcacgtcgtattaaggactttactgcgctggtgaacttagcgggttttattacaatgaggtaagcccaacctaatgatccgttattgaagcaaaataattctgacaaaccaacagagtaaggttgcctccgaaattggaatccgaagtcaatcgccaacgatgtgttctttctatgtactgactatgcaccttagatccaccatgcaacagtgcgctccgatgtcttacattcggtcgacttgcgggcaaaactgccgccaaggctttgtaagatcaggaaattctaaaatgacaactgcaccgcagttgcgagagcatattttagcaataagcaatgaaatcaactacttgaaattcacgaatgttcgcgcggcgccaagacattgcccagcctcgtgtgatgaaatatttttactaagctggatttcattgtgtaatgcaaagccaatcgagcatatggagcttcgtcgagccataagtgtagcgtatatctcccataatatcctggccttgtcttctatctaatgtgagtccgatttcagtcgatttttcacaaagagttgtatcaacgggcaatccatatattcactttcttcttccatctgatgaaaacttatactaatctgcctcaacatgacaattatgggcaattaaaaattgacgatacatgttatacagcctagccttcaagagctttttagtcaaatggatgcaagcccacgaaatactagggaggagatagaatgggccaaccaagacggtagggcccagcacgagaatcgaaaaattgtggatactcccaacagactgcaatgctctttacatctctttctcttactatcgatactacggtcctaccctcgtctaggctcgaaaggttgcaatctatatggattaagtatactgcaaccaaagacgtcgcttactgtttcggaatctcgaaagcaacttccagccgtgagagagccgataatgtatcaaaaacccaagctccatcaatgagtgtgactaaagtatagcaaaaggctttggtgactgtgggaaacacaagagggtatcttgtcatgtggcgatgcaataaaacgggcatttgcaattatccaaagcgcattggaagatttagtatatgaacgaagcatcttggcgtaatcaagacgtataaaactattttactcgtgagcaaacgacactgactttgtctgcttcgaattgaatagcactcaaatcagcagacatgcgtccgtatctgtagggtgtaaagtttagttggaacgcatagtttaggtggcaatgcatcttttagatccagtcaacaatagtaccatttcttttgatctatatacaagcttctcatgttcagcgtgttgattcccgtgttcaataaatacatagggtgatcggtgaactttcctgtcgtccattagacgatggggaattttcttaaatacaaaagtcagaattgaagacagtgaatatacaccgtaggcaggaggtgaacgaattaaacgtgcaaataaaagggcaaaccatgactcagaaggtaatgaaaagagcaatatcgagactcaaacttgtaatttttttcagcctcataaattcgcgtgatccaaagtagcaattgattgattgtgatcacgacgtcagtgtcgacttgctgatatcttttgacaagctctgacttgtcactcttttttccacccgctccatcgttcaaaattccccgcatcgaggtgaaacaaatctagcattcgccccacactctgattgaccagatcctcaaccgacgaaggtctaatgtagaatgctggcacaggtggaaagattatggcaccactccgtgatgcagacaacatatttcgcagatgaatgtcgctcaatggtgtttctctagtcacaaggaccaactttcgcctctctttcagcgtcacatctgcggtgcgtgaaatcaaatcatcgcagaacccggaacttatggctgcaagcgtcttcatactgcaaggcaagatgatcattccatctgtgtgaaatgacccactggatataggagctgccatatcactgatattgtagacgtgatcagcgagagccttgacgttggaaggatggtagtctgtttcgtatttgatggttgattcggcccatttggacattatcaggtgggtttcgacgtgaagatggcgaagggcaacgagtaaattgattcccagtattgttccggtagcgcctgtgattgccaccacgatcttcttgcgtggctcacctgcttggggctgactggcgggcattgttggaagagtcttaggagagcaccccaagttcttaaagagcatggaacaatatcctgtgttggtgctggccgttatggaagcaatggccaagtgttcaaggggggccttttatttaaatatgccacccctctaccttcgttaatctatcgtagccataaaagtcatttatcttgcttaaaatcattgtggtggttgtctttggcttggcaattgctgcccgggtgtagatcggatcctttcgtaacgtatctcctgatggacaaatcgcattcgaggatcgaagctacggctagtggagatcttcggcctgccgggcctgtcggaggggagtgacaatcagaagcctacggatagatcggccggggagatacaagagggtcatagtgtggcatctactatgacgagaataggtaagatcagcatcccgcggctaccacattcctatctccccggtcatagtttacgctaacatccatacatactaaatcgcatgattgagacaactaatatatttaccaggacttgagcagacaaggacgaatccaacacgaatttaattgactcgacttcgtgagatcatctacctttgcatcaacttcaccgcgcaaaacatttgctcaagttatcgccctctctgttattcctgaaacccaagcatcgaaacatgtctacaagaaagctctccgccgcaacatccttgcgcacattccttgaagaatgtaaggccgagggagaccttgtggaaattgatctggaggtggatcctcatctcgagtccggtgccatctctcgccgtgcatacgaaacaggtagcccaataccccttatcaacaaccccaagggtaaagatggtccagatggtctcttccgtattctcggtgctccagtgggtgtccgaagcgatcccgaaactcgcaatgcccgtttggcgaagtctatcgggctgccctccaacgcaactggacatgatatcatccagaagctcctagccgccaaaagagccgacccgattccatctgttcaagtgaaagacgcaccactcaaggagcacaagatatttggcgataaaatcgaccttctcaagatgccggttccacaaaatcacgtacacgacggaggaagatatttcctcacatacggactacacagtgttcaaactccggatgggaaatgggtgaattgggctatcactcgctgcatggtgatcggcaaacggcaattgaccggccttgttgatgtgaatcaggacattggcgccatctgggcgatgtggaaggccctgggaaaggacacaccttgggcctgcgctcttggtgttccgccagcagctgtaagctcttacctattctttttgatattctgtgccagcatcctacgctattttccagaacgctaatatctgaaaacccttcaggccgtggctagtggtatgccacttcccaagttcgtgaacgagccggattatgttggtactctcacaggagttcccgtggaggttattaagtgtgaaacaaatgatcttgtagtgccggcacagtctgagttggttcttgaaggagttatctcggcaaccgagaccgcgatggaaggccccatgggagagtatcacggtcttcttttcccacccaagaaatcgccacagccggtaatgacggtaaatgcaattacctaccgaaccaaccctatagtgccgatcagtgtcgcaggccgtgctccagacgaaactcataccgtttgggccctgtccatctgcgctgaaattctcgacttgttgcagcaggcaaacctaccaatcaccaaggcctggtgcccatacgagtcccaagccatctggtacgtcatccaggtcgatcggaagaggcttgtagaaatgaagaccgcgcctgagaaattctgccgccaggttggggagatcgttttctcctccaagcctggtagattcgtgccaaagatctttgttgttggcgacaatgtcgatcctagtaacttgcgtgacgtcgtgtgggctgaagcgaccaagtctcagccacaggccagtgacttctacttcgtgggcaactatccgacatatgatctagtgccatatgccactcacggcttcaacccccgtgggcaaaaagcgaaggtcgtcaggctgtgcatgttgcccgaggagttcgagaccttggaccggccatgggttgaagcttccttccgtggatcttatccccaagaggtcaagaacaaggtcctagaaaactggcaggcgtacgggtttgagggatctcctgtgaacttttaaaagtcttattgctagggcctttcaactgtgctatctggtctttacgttccttgacgccctaacctttgcttgggaattgaaacggacacacccaactttctcgaacgaagtagaagatggtgttttaccactcacagggttcttcgttggcaagggtgaaggggaatcttgatctgttctaatcattcaacattcacggccccgctgctaatgttctgattctcaatgcatcaactgccgaatcagctcgaaggagcccctttgttttgctactgtaccaaaatcatatagaaatacatacacaaatcaaatacctacttttcgattcactcaatggtttatcttgccgttcaaggttatacctacttctgagattcctaccacaaagaaaaacatggaagtggtgcaagactttgaagaaagtgatcgaaaggataccggcaaggttcaagtgaagatcaccagtacattcgagcctggcgggtgtgttcgtacgaatgtcatgggaagagccttctcggttactttcaactatcgatatgaagccacttcttgctgtcatcagatcttcgctactcgacgtcagctgccaagttcccacgagagaaaatctcccatttcgggacaaaggctagaacaaacaatgaccttgcaatagttgctatcctactcgacccgaaatggccaacggtcatcattgaatcgggatggtctgaggcactgaatagatcgaaggaagatgttttgtcctggctaggcgaatcaggccagcaggtcaatgtcgcactgacgataagggttactccgggggagactgtcacaatcgagcgacgggcactcaataaaacttttgttaagccaatccaaatgatgcagattactcgagcgaagtccgttgcccgagatgccaattctcgtgctaaagaacctgcggtagaattgagggacattaaccagcgagtctccgaggccgaggccgagttcccaaggaggaacagcgagacagattgcatatatcatattccttcccttgagctactggtataacggaaatatgtaggttcccgttgatgctaggaagaaaacgtcagcttaacggcactagttagctaatgacagaccacttgctttttcatgatgataatatagctgctgctttcgacgatttgcaggtgcctcgatacgccctggggaagaaatcggcgaatcggaccattgggagccgttacatattggtacgaatcgaccgtctggaagcgaatagagaatatcaacttcattcattagtttccctgaccggataaggattaggataagggaggaccaatacctatacattacattacaccatacatctatacatctctacatatggagtacacaatacatccatgcgggccgtaccgaccaggcggaactctaatgtaggcacccgttggctctgaagtcatgggatattaaccagctgcacgttgcacgcctctatcacctcggctggctcaatatagccacaaaaggtggtcccggcgcaaaacaattggtctccgaaggacccgactcttcccgctctgtcgccgctggtcctggtcctcggtggccatctgcttccgcacaacccagacccagcctggattcggttggtatctgtgatattgatcaaatcatccatccgagatagatagtgctacttttagttaggacggtcataattctacccgcacctcgttgaatatgtattttcacactaactatgcatatttatgcccttaatgcattcaatatatcaatgtgctagttatttatatgcccggtgcgcatcccctagtgggtcaagtcggtcctcctgaccccattaggaatagttggccttgatgtcatggccccgcataaccccgcaacgttgaacttgcacccttccctaaattcaactgcaatggtttacggttgcagtcttcacctcattctagatcgtttgatgcgaaaggagtctaagctaatcgtatataaaatagaagtagagaggagaatcagccagagatgctaaatgtgacctgtcacagacgggaaggtctatggcactagtgaaatataagccagttattaagcttccttgagtgcccaggtggagacctgtctatttttaccttgtaaggctaaattaaattgacacgggcggggatataacggggattttctgtctgttagcgtttctcggcatccttggctgagaagcttaacacattctcaatataccgtgtcgatttgtctcgtactcgtgatattccctcccgcttgtgcaacatatttgatttttgtgacgtatacgcacaccaccttggcaaaccgagcagcctggattctacatgcactgctaagaacccgtctttactcacacatagcgggccgaggattggcctaaataagcctgcgacgccccggggccggcgagacttttgtactggccaggacaatccacaacttttagtctcaagccttctgcaactgcacttattgcttgtcggtaaatcccgcttccggcttcgttactgcgacctgcagcaagcgacgatccagggacttctgctattcctggctatttttaaattcccgaggggatgaattacctccaaaacctactgcagtgaggggtgattctacactaaagtctccctatccctgatctatcgcgctctccgtgcccgtcccgtctccccgcctatgacggtccatatcccctcatagagaataatgtctcataacaggttctgcagagccgatattccgatgccttgcctcgtttagcgtcgccatgaggggaacccctcagcgaatatttggagaaacgcccgcacctgattagagcgaagggatggtgcaatacggaagcctctgattcataatgttaaacttttgttggccaatctcaagcgtagacatataaaaggcggttgggacgtgatagtagcccgcttttaatttcggttcaacctacttccttctcagttctccccgagtttcttcgaaacgtcaatatgaagttccaactcttcgttactctgcttcctgcagtgttacccttggtgcatgggatccctgctcgcagggatacccccaacccgggtttgcgaggaagcgattcgctggttggacattcgtcatcgaataagggtggcagcgactcgccacctgacatcaagtatactcttgttcctggacagacggaagatcccaatattgggccgtacctcgatttcgagaaagccgataatccacagccgatccgtggttccgcgggggctgatgatcccggtccgagtatgcaatgctattctgattggatgtataatacagagtacactgacattcttttagggaactattactatgacagaatcaatagtgataagcttgcaccgcccggaactgaccatggacagacgattaatgcgcagtggccaatgggtaagtctggtttgtgcagagaaatgtacaatttgctaactgtatgctaggattgagccacaacaggtaatcttcatccccgaacaagaacaccgcagatactcatattttcttaaggcttggatcagatggagctggttgggctcgccaagagaacataaatgtgatgccggatgcgacgctcatggccggtgtcgatatgcgcttggcgcctgccggttaccgtgaacttcactggcatgtggccgctgaatggtcgttggtgttgaatggatcgtgtcgaatccaggtattggctcatctcgaagggattaaataagtactaaccagccaggctgtgaacgagaatggggagacatttatcgacgaccttactgctggcgatgtgtggttcttcccaccgtgagtattgtaatgtgcacggataatgctttatactaattatttatgagtggtgttcctcattctattcaagccctagacgatggagtcgagttccttctggtattcgacgacggtggcttcaacgaggataatacattcctcgcaacagaagtcttcctccacaccccggtaaagaaaagcagatcttacaccaaagaaatccaattgctaacccatacacagagagaggtcctctcaaagaacttcggagttgacgtatcagcctttgacaagctccccgccgacgaattatacatattcaaaggcacgcccgccccagcagacatcgagaaacagaacgtgacaacaacagctggcatcatacctcgcgcccagagctactcataccatttctccgagcagcccgctcacgaagttgccgggggctcagtgaagatcgtcgacccgctcaccttcccaatcgccagtaacttctccgccgccgttgtcaccgtccatccaggcggcatgcgcgaaatccactggcatccgactagcgacgaatggacgtttttcatttcgggccagggccgcgcaacgcttttcacggccccgaatgctgcgactacattcgattatgccggtggtgatgttgggtacttcccgaagtctaatagtcattatattgagaatactggtgacgaagacttggtttttgtggaggtgctccaggcgcctcagtttacaggtatttttcccttgatatatgtttggggtttgtgtactaacaatagtagatatggctcttggtcagtggatcgcgtctacgccgaaacaaatcgttgcggatacgctcaacctcagtgaggatgtacttagcagcattaagactgagaagcaatatgttgtcgctggtcctagcagttagatcgctcacaagtgggctgtttataatccacaatattgataattttcttggtaacttagcaaacctttactagagatgctttatagtagaccatcaattctctgcagtaatgcccaaggctttcgtacccttggataagcagcgagatgagctatcacaatccacatattcttcgtcgttgaacataccactagcagaaagcggaccagcgcgtcatggtaaataacagaaagaaatgcctataacccatcgagacaagctccttcttctccgccttatgttaaggcctgtaaggtgggggtagatcaaggccatcatccggactattcccactggtatgtgggtcattatggtagccaggaggaacagcctctcgatcgtgactcttgggatccaatcccggaatagtagacccaagcacagatgcagattgctaagaatggtcagttgatgcagctccttgctcgatggaattaacttaccccggcccctgagtctgacccatgatttctaataacaataggatcatgatccccagtcttcccaaccaattcattccgcttccaaataccatatttaagaaccagtccctgaaagtccgaccgctcgatgacgcactcagcgacaacgcagtttgtcaaggtagctctctcgatttgactgcgcgagaccgtcgtgccggttactacactccgcttcaccgcgctctggtcttgaatgaccgactgtccgactgtggatcggtgcaccgagctctgactttgtagagtgctgtttatgatatcgctgcgctcgaccgaggccgcgtcgtggaactgcgatttttgacccgtgctccggctcacgtcttctgtcttcgatagtacacagtcacttaaggtggatcggttcacgcaggaattggtgatcgtgcagttgttgataatgcatcgagttatggtgttgccgtccccgctcggtgcgctggcttgggctttatcgttgtccatgatagcgctcgggatggaagtatttgacaaatgaacgagatatgagtaattctctggatgtgtatgtttcccagagcaatctatttcgtcaagaaatgttttggggaaatgtggaaaatttgcgaggatgacatcgggtccgaggctcaacaaagaaagctgttgcctacaattttccagtttgtaacttatatcggatatcctatgttttatatagagtgtcatctaccaggaggactacattagcggaaaatatatataccaacatgattaaaacattgactacgcccttcagtggcaacaattgatttctgatgtccacaaggtccccatgtatatattatgtttatgtaccctttgaagatatctgattctgagaattgtttagtatgcatagacccagcatccgcatggccaattatcgttctcaggcatggtagttggaccgtgatgggagacaatagaaaactccacccccaattcccgcaacgtttcaataccatcctcccagccctccgtgctctctttctggccctcgccatagaacctcctgtatataaccgtccgcagatttggaagctccccggcctccacccgttcaccaatgctatcgaagaaggtaccttttcggtcgaattcattcaatatgagagtctccagactggcaggaagacactcatcaagatcggatgcaccaaattcgtcacatgggtttctttcgtggtacgcatacgtctctatggggattgtgagctgtttcaaacagtacaagcggtcgaaagccggcttgttttctgtatccatcatgtcgaaatcaagatactccacatcagacgagtcgctccgttgtattgctgcaatgtactcggatcgaaagccctctctctcgaatgccccgctcggctgcgaccatccgcctctcatggtgatgtgggtaaggcccgtagggaaggcgaggatctgtccaaatgtagatggttcaatctgacagctaaccaacgccagatctttgagagctgtcttcttaggaggaaataatttcccaaagcttcctgggcgcaaggagtctattatggcgccttggatgtggagcttctcaagttgttccatgtagaaaacaatctcgttttgactaaggtcccacccatctgaccaagaagtactcttgtaggccccgagatatactaaagaaaattagccttttgctcactccatcgagtcagattcaatgatttacacgatcgtagcccctgtcccacgtatcgactggggggctcaatctcagcattatctttgttttgcatcaggaaaacgagtagcgtgcggttgattttggacggcacgctgcgcaaggtcaggctttcaaggttttgcatttcagtgatggcatcaatgagaggataatagatttgatcgatctgggcatcatgaaagtgttcctggaagtccaagacaagagaagataaccaagagctttgctccaatgtcctcgcaagctgctcacagttgatcggattcgtcaaacagatcgaagtgtagagtaatggcgttgtgagaacctggaatttgctacaagtcaacgtaagactgtaaagagaagatggtgatcgttgaaggtgctgaaatatcatctccagcagttcaacaggaagatttagtaaaatggagtctgggacagtcatggtcggtagattgtgacaagagagaaaagatgcggaagaagtattgattgtctatcaatgagcagaagctacctagtgaagagggaacactgcaacgaaggcagcaggggtatcgacagcgaagactgggtaaaagcagagtcgttcactgaggagaacaccgggatgactaggtactggtggggtattttatatccatggaggatcacatggccacttagtcatcctgctctggaatctgggggacactacattattgagtagtcagaaatcagaccaggaactggttaacatgagtgaaataacagagtatctgaagaaacaagcggatatcttatgccgagctcactgactcccctaaagcggccgacttgcaccgacggctagcacagctatggccatcgaagtcctataccccgatattcttgtactccaactagatgcgtaagtaaatacccagctttggtcgacatagaaaagtctacaaatctcacaggtatcattgaagagtaaaagttgctattatgtaaatataagttgaaagggacttcatcccggaaaagaatgtacatctttagtggtttagcaaacgtatcaggtctgctgtaaagccataatatatacctgaactgttccaacagactggacctattccttcagatccgcacatccgagggcgagggtgccaccctaaaaccagttagttatggactctccgcggatgagtctgcgatgtagagtatcacttaccaggaggttagcctcggtgcagcactggggcttggtatcacagctggatgcctcgtacccgtggcctgtgagaaatgttagaagatatcccaataccatctggtaaacataacaagatagtccaaacatacagagaagaccaatggatccaacgatgttggcagcatcaatgccaagagtcaacaagagggggtcgacaagggggtcgagaggagtggtgagagttccacagcagaggaggggaccgacacattcagaagtatcagagcgcttcacggagaggctggactcctgagggagggcggacaccatgccggcgccagcgagagaaaggacggagaagatagagagtctcattttaacggaggtttcaagttggttgttagaagaagagaggagtagttgtgatgaagaaaggattgcgattgtggatgatgtctggaatccgtggaatatcctggtccttatatagttttcgagacaggatatctaggtatcaattgcttccaagaccacccctatgttcaataattgagtaccctgatgatctaggtcagattgtggaaactcgatttgtgagtcgtaaaaatgaacccccgagtagttcctttctcaatggatcagaagatctgcaaaactctagatagcattggtcccagtgtaagaggtcatgtgagaggtcttgaccacgaaccgaggcagagaggtgctggaagggcagtccctggtactggaagagtgaactagttccttagattgaatcacatagttcatgatgtggatatccatgatccagatgggttgtaagcgagctgtcttggctgtcgatcactcttgctccatgctcactgcggagtaactccgtatcatggaaaggcttgtagtcactggctgcaaatgccaaatcaatatacaaaaccaatagccagcggggcaaaccccggttgtttcctctcccatttctccggggatttccttatcagtggagccggttccaggatcttccctggcaccgaatcagaactgccaagacgtcgatccatcacagggaactcgcagagcccattctctccgatcgacctatcaaccggaactcaattgatgaacaggaaccaaatctctgatccgtagtgctgcagtctccgcaatctgaaattttatgcagttggcttgcgatttgtcatttccaaccccggaaaaaacgagatatttgagataagtctcgcaccgttgattgcacggcaacgaactagttttcgagcaccaaggggttaacattgtgttgatccaaatgtcttggactcttggtaaaccgatctgggcaaagttaatccggatgaccattgttcttcattggatcacttgaagtttcgtacatctcggcttcccctgattgtcgtcatggtccgtgacgatcttgataagtatgtctgaatgagttacgtgaacgattggatccaacattagaagcagatatcgatgctgtgccttgtttagtctgtcaactaagagccgtggtcatcatctcaaacatagtctcaaatcatatcatcttggctttcaggggattcggtatttgtcattatcaattcgaccatctgccgaaaaacaggaaaagactgggcattctcgtggcgggatctggtgagatcctgggtcaggacttaacgggtcattgttggccatgggcagagttcgcatgggcctgcaacatttcgtggaaatttcttgaaattcagataggattccggtcataacgatgaagaacgaagtgaccagggctggtaaagaaacatgtggcggtgtccatgtggcggtgcttgttcacaccgccacaccctcgcgacacaaaaaacctccccccctcnnnnnnnnnnnnnnnnnnnnnnnnnnnnnnnnnnnnnnnnnnnnnnnnnnnnnnnnnnnnnnnnnnnnnnnnnnnnnnnnnnnnnnnnnnnnnnnnnnnnnnnnnnnnnnnnnnnnnnnnnnnnnnnnnnnnnnnnnnnnnnnnnnnnnnnnnnnnnnnnnnnnnnnnnnnnnnnnnnnnnnnnnnnnnnnnnnnnnnnnnnnnnnnnnnnnnnnnnnnnnnnnnnggtgccgtgggggcggtgtttttcccccccgccacaccctcgcgacacaaaaaacttcccgccttcaattaatccacaccacattccccggggttatcgatcaatcaacccctctacctttttgatttttgagcagttgcccagcgcatattgcccatagatcacaataaaaatgccttcaacatctctcgccgacctggtggccgccctccccttggaggacacctggggcccctccacctccgccgataacatgctttccggtgtgccatatgctcctttctccaagggcgacaagctgggccgcatggccgactggaccgccgagaccaaggagcgtcagaaccaacgtccccagtacaaccgcggtttcagaggtatgttcaccttttttctgtccccaccaagtttctctttcagtcgaatagcaatggctaacagtcccattagaccagcaggtgtacggcgccggtacctccaacctcttcactgtcgcagccgccgaggacgagtcctctttctccgtcgttgacaacactcgcgtccagaagcgcggtttcggccgtggcggtggcaccgttttccgtggccgtggtggtcagcgcggcgctgctaaccagcgcggtggacgtggtggattccagcgtgctggtcccaatgttggccgcggtcagcaaagtggctaccaattcagcgaccgtggcggcgcccgcggtggccgtggtggccgtcgtttcggctggagagactacgacaagccccagcgcattcgtgaggcatctgtcaacattcgtcctgactggaagatgctcgaggaggttgacttcacccgtctgtctaaactgaacctcgatgctcctgagggcgaggacctcgagacctacggtttcctccactactacgacaagtcctacgacaagccccccgtcaagaacgccgagcgcagaatgcaagccctcgaccgtgctgcctacaacgttaccacctcccaggatcccgtcatcaacgagctcgccgagaagaacgccgctaccgtcttctctacctccgatatcctgtccatgctgatgtgcgccacccgcagtgtctactcgtgggatattgtcatcgtccaccagggcgacaagatctacttcgacaagcgcgacggtgcctccttcgacatggtcagcgtgaacgagaatgccatcgatgcgcctctcgaggccgccgaggccgccggcaagcaggagcagattaacacccccaacgccctcgccatggaggccaccatcatcaaccacaacttcgccctgcagactctgatcgagtccgacaagaacaaggtttccttcgccaagcccaaccccttctacgatgagaccgaggaaaccgagcccctcgcctccaagggttacaagtaccgccgcttcgacatctccctcgagcgggatgaggagcccgtctccatggtcgtccgcacagaggtcgacgccgtcatgaagggcggccccaccggtactgaggaccagcagctcatcatcaaggccctgaacgagttcgaccccaaggcccaaggctccggcggtgccctcgactggcgcagcaagctcaactcccagcgtggtgccgtcctcgctaccgagatgaagaacaacagcgccaagctcgcccgctggaccacccaggctatcctggccaaggctgacggcatgaagctcggtttcgtgtcccgtgtcaacccccgctctgctgctgctcacgtcgtgctcggcgttgctggctacaagccccgcgagttcgctagccagatgaaccttaacctcggtaacggttggggtatcgtccgtactatcgttgaccgtatccgtgctcttgactccgacgagcccgccgataaggtcaagaagtacgtcctcatcaaggaccctaacaagtctgtcctgcgtctgtacagcgtccctgctactactttcgaggaggatgatgaggagcttgaggaggagaaggagggcgacaagtctgatgaggctgatgagtagattttgttctgatgaattatgttcttccttaaatgtgcatactcgacctaaaatttgatgcttttatactctgactatagagtctaaccacaatctattcaacaaacttcatttttccagacaaacttgacttttattatctcaataactaaaccattatctgtgcaaggagaagataccgtttggttggcacgtccccggatcaagaagcctgttacgcggatgattcattttagtaatgcttcctttatgtgttgcccgtgatgtccatagtcgagtaacacgacttttgtacaactttctcgggggaacacaaggaacgtcttgggtgcctcctggtgacttttggcggttctacgcgccgaggattttctgacgtgggtttacgggtataatgctctttttggatatggatacgcttatcgagaaggtgttgtctgctgatatttgagtatcatataaacttagtgtcattagagtagagtagagtgatgtattggaagcaaaattcaaagcaatataatccattgctctacctgataggaagaaaggcaggatatttccgatttatatatcatctgtaccgatgatctcacctatatacaaccctcccagcgggagtgtcgaagacaaagaataagagaaagaactaaatatagtaagagtcaaaataaaatagttcacaagcacaatcaaaccgaaaggcaggcaacaagcaaagacgccgagtcactccgtggcggtagccaacacaaacaaaaagacagattctccagacatcagatcataataattttcattgcgtccgaccgctcaaccatacatcgaatcatcgggcgcagacatgctgagatcgaccttggtgccgagcacgctgctcagacaatctatcaactcgaagtcctcgaccacagcaccgaagccgtagcagcggaccttagtgttgagcgtgtcgataatgatcttgatatcgtcgcgccgcagtgtcgggtacagatcgtggttcttgagacactgcagcgccatgatgggcgtgatctgtccttctgtcacgagctgtcggctgaggttgaggagtgtgctgaggtttgcatgcggtaggtccggcgccttgtgcgggtatggttgttcgggtgtcgttttcgcaatgtagctcggcggtgggcacgttgccatcagggcgtgtccggaaaacggcatgtcttcgtcgtcggcttctgtgaccgaccgccggcagaggtagtctgtgtgttcgcgacagggaccttcgagtctataggatgtattcgttagctcgtgtttgttattggatgagaatgggcctcacgttaggataaagtcaacctgcaactgggggtcggtttcgaagacacctccccgcgtaactggcatgggctgcatagtatcgacgggtgcgcacgatgaatgatccatgctcatggaatgcccgcctacactcgtgtggtacacttgctgttggggcgcatatccgattgggggcgagatcgaggagtgatccatgccattggcgcgggggctcaagtcggatgagatcgtggttgcaggggttgtgttggggttgctggtcgagttggcgagaggggcaatctgcgacgcattgctgctgccagccacagtaacaggggattggaaggacatcatcggtgggcgctccgcccggcggcgctctagatccgcttcgtattggattccgctcgctgcgagaatttccttcaggatttcgttctcctctcgtatcgaatgcatcatctctttatgttgttgaattgatgcgttggcctctgcgatctctgtggtgtaggcctctcgtaaccgcgatacttcggtctccagcgctcttatgtattgttcctttcgctcgcgatgtgtcctgtatagatcagtccagcccgatgttctcgaatccgcaggatttgtacctctgggcctgacgatttaattcctgccgcctggtgagtgcaggcttactatccggcttggggccgcgacgtttgggctgctggccatctgcaaaggcttagtcgtggtccgaccgactggctgggatcactcacctcgcgtggtcttcttcggcccggtaccacttgtggcgctgccactgccgcctcctccgaagatcttaaatatttcggcaccgaagcctttgttcgatggggtctgcggttcttctaccatgtcctgcaccgtgcactccggggccgtgggccgagccggaggagcatgggcgccataatatcagcaactaccgtgggaatgccataaacagtggatatttgcttccggtccggaaaagctcagggtggtcggggagggtcagctctggatagcttaggtggcgagaaccggggaaacccgctgcaattcctcgaccccagccttcaccagctttaccaggtttaccagtttgcagactgcttgcagactgcggagggaccagcgaaatcaattggacccgtgcattccagcttatgtggcgatttgtacgttgtagaggtgctggataccccccgatcgcgaaccaccgccagcagaccaaaaggaaatgtagcactcaccaggatagcccattgcatgatccatagggtaaaccccaccactgacagccattataagagttttcgcggggaagggagaggcaagggagaaggttaagtgtgaaaatgagtcgagaaggtatgaagtcccgtgtctggagtctggagagtataatataaggaaaagaaagtggacggccgatttttgtacaactccttttttattttactttatttaattgtttgataattccttttctcttacgtttcttattaacggattttacgcaaattaaaatcaaaaaaaaaggcgttcgatctgtcttagggcccactgcgctataatcaaacggccgtgggacccgactcttttcgttgacagatctagaactggcagagattggctgaacggggtctaacgtcgtatcagttgacaggaatcgacaggaaaagatacgacagacacgacagaggcaaaatactcgacactttacacactcgatgcgttactagagtcatgagaagaaatgatacatagtcggtacgtccttatacgtgtgttatagcactacataccaagtacttatgaagtaccaggtacgtgcgaagtcagtgtgatcagtcaactgggctgaccaatcatccggccaataggcttggagacctccaggcacatccaatagtctcccatgctgagattatcgagattatcgagatcgcgaacattcccagcactgacaaataatacgatccctgggcatctgccctattcccactagtgcacatcgaatacaataatgcgcgcattagaaacggaataatgatccagctcccggactcgcagattctagtgcacatcgccgccgcaagcaccgcacaagatgacgcgcgctatagggcgcaagtcgccgccatcctagaattccagtgtgctacgcgccaaccgctgatgcagatgagcaagtctttttccaatgatagagacagcgcgcatccattctccgctggtgccgccgtgcattcttcagtgcccccgacgactcaacacgaggcctcgccaatattgcgggaggcgttccggcccgcagacacgaccttaccctcggatcaacgcttgattcctgagacggatggcgcggctccacgtaacatcatctcaaatcaattaagctccttagagagtcttatcagcgtcattccagactcccaacccgagatcgccgacgagctagtccacgccgagcaatctcgtgcagaactatcgcctcaaccgcagcgtgctccaccccccaaaagacgtcgcatagccccggcctcccctgatccggctcaaccggttttaatttcagactctcctgcaacggaccagcccgctgcacatcacagagtgatctccatccagaaccaggtcccaatatccagcctaggttcagttgagggcccttccacaccctcgcatcacatgtcgaccaacactacaacccctaatcccataaatctatccactctccccctcgaaatccaccctccaagacccccaatctccactgcctcgttcactacccacataaccccaaccctatccatgctcacagagcgcctaaacccagcacgcatctacaacccatccactcaaacccgccccctcgaccccttagaacggggctactggctcgtgcagctcgccatcgaggatcaaacccacgaacgagaccgagaccgagatccagccgatcttcctctagtgccatccccaaactccaagcatggaaccactaatccaaatgcaaatgcaatgttaaactcaaacccaaaagaaaacaaacgatcctggccctccccgctcttccacgccttctggtccttcctctcggacttcgtaggcagggacggccgtgcgggttggggcgtctggtgtattcttgaggctgcgacgcccccgtcaacgcgctcgtctaacacgcacgtctcgcttaaagtctatgcgtggggcgaggtcgctatgcacgtctacctgttgctcttcttggcaagtgagcgacgggttcgagggatgggtgttcagtggcgggatgcacgagaggaggttgttattcagatgccttaggatatggtccttgggtagtttgtttggtttggggatgggaaggcatgttgatatttggttgaaattgtgaaattataaattatacccccatagctttgcattgcgataatatcatttgaaattttgaatcttcaatttcatattttgatagaagaagggttattgtacatgctgaaaagaagaagaaaaagaaattccgtcgaggatgatagtaaacaacaaggagatagaagtgaaagccatgttttcgcgaggagagatcaatggaaatgattgaattcaataaatgagcaagtcggagtcagcgagtctccgacggtccctccgatgcgccaggtcgccaattggaggaaagaaaaaaataatgacgaaaagtgtgatcaaatcagtgcatggaactagtactgcagttcgccgctgccagaggcatcgactgcatccagatcctcgtagctcttcaggctgcggccttggacggcttcgcgcggggccatgggacctccgctggaacccattgagtctgggaacgggttggcagcggccatgttggctgcggggtggccagctggaacgctgacaccaggaggcggtaggcgaccaccatacatgcctggcatgccgcggggagggctcagtcggccgtttccattgaatcggcgacggtcgtacgggccgggtcggttgttgcggttctggccgcggcgcatgggtccgggttggtgaagaccaccgtcgtgtcccattgcatttccattccagccggaacccatcatgccgggaattggagggaaggtaggcatgtttccattgggggcgtagggcatgctggcaagggtgaatccacggggagtgccggtatgaccttggccggagccaagtgggaagtgaccgttgctgttggcatcggatcgggatggggcaatgcgtgctgggtctaagacataggcattcactaaggcgagctatgatgactgttaatactgggaataatcgttggatgatcgcacacttacatcgttcttgatgccattgaaccactctgtatggcgcttctcgacatgcttgcgccagaaggcctcggccttaaaaagcttggtacattcaggcgccttgcaccggtacttggagtcgtcctcctgcttcatatatttcagaagttcatcctcaagcgcctgatcgacgggcttgccgccgagcttgctgagatcgacgttctctggctccaggatctgcagtaacttgtcttcgaacgtcttcacccagttaaaggcacgttgcagttgctgttcagatttggaaccatggcgctgtccacgcttctcctggacaggcgaggagggatcttctccttcctcactaggttccttcttcttggccgggaatggctggccgagcgcgctggctcgggccacttccttggcctgggtggaaagtccggtgcgcggacggcgaaggtgtccaccagggcacttgcggccgagttcatggactgagtcactttcaaagacacagaaaaagcagaagttgtagacacgacgtaggtattcaacaaccaagtctagcttcttcttcttcactgcaagttcctcatcatccacatcttcttcttcggaaatttccttctcttcaccttcctcaatctccccttcgtccccttcatcgccatatccgtttctctgcttcttgacactgactggtcccgtagcagggggctgaagctctcctttgccgcgcaggtcgtcaacatactcttcgatcttggtgaaaccatccacagagatgttcatttcggaatccagtttggaagttaaacgtttggccagctcgagatcacgatcaattcgctcaggtgcggagaacagatcccagagagccttcttgcgcggctgagcaggggggacatgaaccccgacatggcaaacaaagtcaccatggacggaatcatggatggtcttgtcattgacagcctcgagagctttctcagccgggctgattgtgacaccaccgttcgcacctccatcttgatccatattttcgaactcttcatcgcgtccatcccctcgctccactgtggtgtttgcggaaggatgcaacatgatccatcccatgcgatggaattttttagatgggttcgggtcgctgaggctcagccccttgaaacctccatcttcctcgccgagatgctccttacaaaactcctcgatcttgctgcggctgacgttgggtgcgagggtttttataaggagcgcaggctgtgcaagagcttcgtcacgaaggtctccgccacggactggaagtaggtcaagcactcccatggtctcagcggtagccgtagtctcgccttcctccttttcaaccacaccaccggcaccgtcgctatcgctcttgtatatgccttcaagggtaaagtccttgaaaaggttattttcaatatcatgctcccactgttcatatgcaccttgtcgaaccgtcatgagacgggcgcgaagaggatctctgacttcaggaagatatcgttctttgaaccactcctcgttacggtgctgctggacgaacagcctggccagtcgaatttgcagatcaaccttgtatgtatcataagctgcctggatttgcgcacgttccttctcccgatcttcgcgcgcctcgcgctctcccttgactcgacgaccgccgtttttggcgcgctccttctcctcattcacagattcctccaatctccaccactcggcaaaccaattgaatccgacttggaaatccagtgtaagaggattgggcatcgggttggtcggaataggacgcttgccaccactactgctgtcttgtccgggcacatatcggtcgatgttggccacagttggcgacggggcacgtcggcggtcctcgcgctctcgggcagcatgctcccgagaattgttgtagaagtcctcgcggtgagaacgacgctccgaaggctcgtaccggtcaatcacgggcgagcgggagcgcggccgtgcacgtcgccgatcttgagaggctagtcaagagttaatttcgccctcctctctccaattctcaatgatagacttaccgggcgaccgacgtctgtatgattcccccgtggctcgtcccgtaaaagaatccgactcacgattcctcccgggagatccataaccatcgtaggagtccatcgttctcaacctaccggatagggatcttgtatcgccttcgttgcgatcaaggtatcgatagacccaaggactcagcccaggtggataaagaacaaacggaacagtttgccttgatcgataagggagtcgggaccgtagggtgagctaagatttggtatcgtcaacaacagaccaagcaacttcatagagcgaaatagcgatggtggcgactgggaagttcacgagggataacagaggcaggggtcagggaaaataaagagacaagaacacactgctgctggcgacatgtcaaccccggaacttggcaggggttggaacatgtttgcagcaggtggttttggatagcaaagagagattatgaagaaggctgttggccagagccaatgctgttatgcatataaggagtcatagcccacagaatccagcaatgcgcagctggcgccacggcttagaaaggaagaaaagaagatgaagcaggggaatggaaaatcagggtcagaggagcggaggctgatagaaagagaaagggcaagggacaaagccaaagaatgaacagaatccgattggagaaagaagagggccacctacaagaagcctcgagcgataacgtgacagttggtgataaagggaagaaaccgagaaggcggacgaagctggagcaagcttgggcgcttagccgaaaagggtatggcgtcacggggatcactgacatccgctgattggcgggtcctcaggaacaaggccagatgacaattgcctgccctaacttggcgacaagttgagtggaatttgcaagttaagaataaaacgagaagagggagggaaaggaaaattggttaagttggaaaaaaagtgagcccagattagccacgctaaggccgccacatatgaatgaagtacaactctagaacagtcaggaggccggcaacttgactgttgttagtaatttacttcatgggaatctgcttcagtggtgtaatacttgtctcactgaagggcctatcaacctgttcggttttctgagcccctgatcattcatgttggtcgccaggtcgccaggtcacctttcgcttgactacatgactagcgccgacaaacgaagtgatacatccatgcatagatcccggggctacggagtaattgaaatatggaacattcttttcggcttttgtgaatatgtatgtctataaattgtatacagggcgctgtatatatctaaaggatccaattgcaatgacaatataataaaaagaccaggtcttctcgttatagtcactacaaggctggtattatttataggaaggctaagtaactatagaacgaagcccagattacgcaatcttagaggaagattcttattagagcgccagagcaacaaagaaaaacagtttcacttggggtcaacttttcctcttcacatacctaccataaccacataaccctttcgatataaaccttttgacagagaaaatagtgcataggaagtttgggtgtcatacagtacccctgtcagttggacatgtattgttacttacgtagattacctagtatttccaaatgtgtattcacttgtatatattcaatactccgtacatgcaaccgcctacactctttgagtgattctctagctccaccgccgagataaaactagatcatattagaatggcaccggaatatcaatattcctgtaccagtctcgataccgtgatttacttctattaaaatacggtgtctcgtcgcgtaactatattggcgatcctagggaactagaattttccatggaaatgcaaacaaggcaaacaccagagcttgacagtgcctcgagcatctggcgacctatcactcgtgctcatgtctaagtgacggtatgagaggcttactcgacaccagaccctgcaaatagtgacttgcattaattgattaatgtatctgcagactactcatgaacctgcttatcatcatactcagcctgtcaaccacagtcctctcttcttgacgccttgtactgtatcttcatgagatgttcatcatttttctcagagtctgaagagacactggttttaccacataatcatcgatccctgccaattgcgcttgttgttgcatctcagcggaagcgactccggtgacggccatgatgcaagcttccgggatgttgttctctttttcatactctcgaatctttgtcgtggcggtgaggccatccattaccggcatggagagatctgacaaatcaggtcagaggatattttcaagactgaggtgagataaaccaacccatcagaacgtagtttatgcgttgcttggactctttgtatctgccaagcgcaatcaacccattcgtagctgattcgtagctgcagcctagtttttgaacaaaggtagtaaggatctgcaaaagagcctgttagcacacctaagggattggcagggactatgccactgtacctttaaattaatatcattgtcatctacaataagaacgtgcgctccgtcatcggtgatcggtggctccaaggtaacaggaagagttggcgcgggggtctgtgcagctgtgttagacattccagatttgggccgagtatttctgcgagcgtcatggtcgtttgattgcagagcctcctgcacaaacgccgtatcacatttgggataaggatcttgatgggtctcagatagctctaaatcagccaatattgagttgacagcctttcgtagtttttgggggccatatctattccaaattagcaaattagcaaggcatttgtgagaatgatcctagtacgcacggctgagagacgcgaacaagattcgccttgaaattgccctccgcaattgaaagcttctcacccagcaccaagaaagacttgaaccttgtttgaactgagaacaaagaaccgtcctgcagcgtctgcagtagttttgcttcctcgataactgcaaaatcgccttgggcgttttcgactgactctgaaaatgaaacactcaagttcggttgggctaacaacacctcgccgacggccttttgaatcgatagtttacgttttgactctgtgctttgaatgccagtgggtgtctcctgaaggtcgggatagccctcgaagccgattagacatactcgagtgggcggaattgggacggccggtttgctgtacgggtctaacgattcagaactctccgcggtcaaggattgaaccgggatgtagatatcgatttgtgtccccatacccatttcgctctccacgtcaatgtgaccgcccaggaaggtgacgagcttgtgcacaagactgaggcccaggccaatgccctctgataatgattcttcctgagaaaagggagagaacaccgagtgtcttaaatactccggtgatataccacggcccgtgtccgttactgataggtgagccagcacaggttcggaatcagaattagggctgatatttgacaaggacacttcgatgacgcccttccgggtccatttcatggaattgccaacaagactcatcaaaattctcctccaagcaccagctaccgtacgcactttccatggagtcttctcttcgatccgaatgacgacactgagattttccatgtccctggcatttgtagaggggattgcaggggtcaaaaggccctcaacgtttgactggaagctctgcctatccccggtagtctgcgatgaatacataattccagtcacgtcctcaatgaggatgcccaggtccacatcggtcatcaatgtcgtcatatctgccatcaagctatcctccctttggatactattgatcttggtgaagtctagtctagaagtaatgatagatcagcaggagataatgcgtgaaactgaacaaaacttacagatggtccaaaacatctaacagcgttagaccgcacgattcgatcaacttgaccatatctacctggaccggctcaagggcagtcgctcgtagcagctcagtattaccaagaactccgtggagtggcgaacgaagctcatgactgatggaggagatgaaatcagatttcgacttctcgatggcatcccagttgacgcgggcaacttctgaaattattgaattcccgaatgccttgaaaaatccgagctcttccgaacctaaggcacgctggggtagtttcgtccaaactagggtcccggccagccagcgtgatttgttccaatcccataatggaagaaaaaggaccgagtctgcatctgggaactgtgccgctaaagtttgagtaatgtcattagaagcctccaactctgcgggctcgttatcctcaaattgatcgctcatattgaatatttgaccttcaggatatgcatcaatcattattctcaagagtttctccgtaacggcgactccggagtcatcaggtgacctatgttctgatattccaagtgcatgtccaaaactctcgcacaatgattccgatacttctgatgacctcccgttatgttgaaagggttttctattgatgaggcgccgtaatcgtcagatgtttcgttcacgaagcaaagggtggatggtaccaacactccagagttactttggtaagcatccaaaaacattaccccagcaaggtccatggaatccctgaggatagcactagcatgggagaagattgaagcaatgctttgagaaatggctactccgggctttatccgcgaagtgcggaaatgagaaccaactctatcacgcgtggtgtggttttcattcagtggagtcatcgccgctatttgtccttcgaagctggaaggaacggaggtgattcgtgtctgatcggacctttctgtggaaaatgacagtgctgatatctcttcggcgattgtcgttgactccagaactctggctgcgtgcattgaaggagacaagccgctctcaccgtcgttagccgactgagtatgaagaggtagacccgaaaatgtggcacttggtttcttcagctcagcatcggggtttggatggtcagtgacaaaatcagccactcctttgactaatttctctgctcggcggtgaaaatgcacaatccgggcgttttcaagatgatgggcaatagcatccgcaatttcttgcaataaagcaacctcgtgatccccgaatacgtcacgaggcttgtcgtccactacgcagtatgaaccgagcacatgccccgaggcgctaaacagaggtacttctgcataaaatcgcatatgaggccagtcaaccacgtaggggcgattcttgaaacactcttcggctgcaaaatttcggataatgtagcgggtgcggtccgcggttatgttgggcgtgttaagttccaacgaaatgtcctgggccgtgaataacttgattgtgtgagggcacaccccccattcaaggttcaaagtcctgaaccctagatatatgccattatttggtaaatgctgatctttatgtcgcaaggatatggacgctgtcgtttcggcgaggatgtgttgactttggccatcaataatggagatgaatgaccgatcgcacccgaatctatagacgcctagttgacctagagcattcagagtaatatcgggggagaggtatgcggtatcgggctgctcgtcatccaccggtgcagctggggtaggcgacggattgttcacatcgaaatttctgaaagtgcaatagtatctggagactatgtcagtaataagggtgctcaagactccttcggcagaaaattagatcgcatagaatgagatcaaagacgcacttggataattctcggatgcgatctcgctctgctcgagatggcaggggaagatctggcctgcgagcagccaacaaggccatatttcacttgatgcaagtggaaaagggctgagagaggaacgtataagtacgtacaagatgggagaggagttgagtcgagactggaaaagcatgatttcacaggtcgttattcttgattgccgacagactccacaaaggcaaggccgactattggccggctctggcagagcgacccgtatacttggatccggggcatcggttcttattacgattgctcctactcgagctggaatcacttggcatctgcgggcgcaacataatcctccgcaattatttcgaaaaattatgctgaggctccactagcaaaaaaaattagatatcattggctgcgcacggaacgcagaagagtgggaatgggggatcgccatgaggatggtacctcaaaatttcggtataagcagaaaccaccttttgtatcgccgtcagggggattcgaagaaatatagatagagtgcgtggcaagggaaagggggtggggggagacattcctaacgcctgaatgcatgcctcagcgtatatcgtgggtttttcaagcaggcgatcgcacaaagcctcgagcatgactagagtgatactacaagggcgtccacatttaatacgtggtgctttaatgctgccaaacattcgtatattggaaaagattctcaggatgatactcttgtagcagtctgtgccatctgcgatatagatagttccccactgaggatcatatcatagataagttcatgctttgcagaggctaggttttggcgccatcttggttcggccactcgtgattgattgttaacatacggaacttcccactgtagtagggtatggagctgttgcaccaatttcgggacgtactatactcaatcacatgctacatcagtcttcttacgactcaagaagaacgagatataatgcggtaatgcataccatatgtataggtacatatatatcgccctcaatcttgacagatgacacaaattcaggcaagaagaagaaaaaacccgttatgacagctcaactcacgatgtccccacaggtcttttacaagcataaccttggaatatttgatactagtagggccatgctcaccgctgattggctgaccgagaccaccgcgatcgccaaatcgcaccagcataacacgccacattttgacctccgatcgaacgaccatgtccggtctcttcaactctcgctgggcacccgtggatgggggaaacaaaacatacccggcgagtcaaaatgcgccccggtactggtcctccaacaactctaatcccggcggtcatagcagcgtccgtccgacgactatcacatcccaagacggccgtttgctgccgccagccgaagaattggctcgatttatgaaaatcgtcgccaggctgcgatggaaacttccatttttagctgagggataccgccttgcgacactggaaataagcgatgtcgtatccgcagacgatgtcgcgcacgctgaaataatgttcaagatcgattttcatgaatattatgctctgcttgaacgtgctattgtccacttactggcggtattcaatatatcggttacatcctcgcctcggggaccaccagataatgggaacggcgtcggtcggcctgttggtattcatcgataccacgccaatgtgctagaagccttgcgggaacagtcaaccccactctccccagttcttggcggtggctctgtttatttgcaattgcaaaaggccaaggaactgcgtaataggtggaaaacagctgatctgaccttggaagaaagagaaaagcagggtgaaagaaaggacgtcatgacactcgcgagctttgacttcgaaggtatcatctctgatatttttggtggattagaagaatcatatgttcgggcaaaagagcatgtcgataagtgcatccgcccggaggagggcactggagagggagcaaacaccgaggcggactgggggttcatggtcgatgctatggattgggaagccgtatgagagttggccaactgcagattttatggcctgtgcttgatgtgtagccagtgtcaaatccatggttcgataaccaggtgcatgctctcattgctatgcacacccctgttagcactgcaaaatggctcgatcatggtcttgagtcacccaaatcctgttatcggtgtacctcaacaattgcactcgctagtgggcggttcgaaggttccccagctagaaactttgttggacatcgctgcagtccttggacattcttgctttcatttggcgaagaaaagacatgtcacacctttgttgatcactgcaaactgaatgatgtacatattagctgaaatgtgctatgaatcaatatgaacggagttgatattttggggctaaataagcatctcaacttgtcttgctcgtcgtccaacttttctccgatcaagacccgcagatgacttatgttatctagaatgagtagcccatgtaaaaaataagtaacggttggaaccatccctatcagtgagaactaaagagctaccgttcttagatgtgatgtgatgaaagttgaaaattctgtcatcacgactttctctgcgtggatttcaagaaatcttaattgatattttaactgcctcttatttttgaaaattgctcgaaaagcatgggcttataacctgttgagcactacgatgtgtgcccagacgagaagagagagataggtaattctgactaaggtaaggttgaattgggaggcaggagctagaacgtgcacgatttcactggccttcgcgttggtagtagaaatgcagaggtgaggtaggagttgggagtgtacctcgcaggtactgtccgatgtcgtgagcatgatggatatcttggaagataatcatgtccatgatcttaattaaaatgtagcccttaagtagcttatccctaagaaacttacggcgggtgcgccgggaattttgttcatgtaaccatttcggcaatttcctgccacagaagttcaggcttcttatcacgacctcgagacaatgctttcacttcaatgatggcaaacttctctgggaatgcccctgtctctagacagccgtctgtgagtataaccatgttgccaaaggatgctttgttgaatggcgagcgtaatggagaccaggcatagtgcatctcggagagatggatcatgaggaggcgtggtagagtttcgttgatgatttgctcttccagcgcgatgtccatataggcggcagctcagctgctacttcacttatcgtgatagcgatttccgactgaaggtcatttatttctgacggcagtctcaattggttaaagtagagcctgtgcgcgatccatcttcgaggagtagttggttctagctcgaaattcggtgggatcctgtgctgagactgcgcgacaagctggaaaacacccatattccgattagcatagtattttgtatgctcaccgatgtgcgcgtatactcacccacatattccaggaactaggcggcgccggcaccgatatctgtcttctttgcctcgtcgttcattccgtactccgtaatcaagacgagcgggtggatgggatggccttctcaccatttaattctaccgggccatgtctatatggcctttcgcttagacgttaataagttgtgcataggggccagcgatcccgtgcgcgttcaggaggaggagatggaagttccatagataggtactggctggacatgttgaagttcgtagttgcctcgtgcttgaggtcgagagccttgaccacctcttctcgggagagaattgagagagatatgggtgagtgagagatatatggcggtggtgcctacctcttgggtggaagctcgtgatatttgacagttgcgtgaggttgatggagtcctttgtgtaggcatgatcaagtctatctgtgcgtaacggaagacaatgtcgtacgtgtgtgcgtgtcctgctcatcgtgtttgaggtgtaagcggtgttgctggcttcaccaaagagaaagccgcggaatggttgcacctttgtcttcttcatcaattgcgtataagatgagaaagaagatcagaatagtgagatggcagccgtggaggacgagagtaaagatggtcatgcggacgagtagaccttagggattttagactggggagtctttgaatcaaaagtgccactagtatctaatagaggttatgtaagattcactgaactcacaggttaatgataaaaatatggtgaagtgagaatgaagtgagagtactatagatcagatctgtagaagacgagagtaaatatgactgacagactctgtagaggtaaaccattaactagaggcttttagactacagacttattattgatgtccattgctgttcgactatatctcataactaattaactatagctcttagcttcgtcaatgaaatggaaaggtagaaggaactctttcaaaacagactacgtgtacgttcatagcttgctatcaccatgatttctccttattgcgacagagaaacacgaatgttacaaaacagaaaccccaaggattaccgatacagacaaagacaagacaagacaataagtgtcaatatctgcaaatatattcatagttccaaatctacaatccaatttccacccctgcccacccttgccctgcaagttcctgccaaatcctaaccgaaccacgaaagaacccaaaggaaaaagaaaataaaacaaaacatcaacactatcagtcgagtgatattcataacaaaccagtctttcgaaaaccgatattccgatctgtttttccagtgatggagaccctctaaaattcccagccgaagacccataaacccgcaacacgagacaccggagaagaaaagaagcaaagtaggaaacggggatgtcataggaaaataaaatgaaaaaagtagccagaagaatattcataatagaaacacgaaagtggatatcagcatggggacggaaaggtggagatagcacattcgggtgaaggtcgaatatttagccaattgctaactgccgaatattatgaggcggcatatgcacaatcatgtactgcccttgaagaccatacatgtaatacaagggccagcgggcgacacaatttccagcagagtaaagcagagcatgctatctctccagtctcacatatcactctcaacaagtgaaagtgtagatgcttgaaacggtcattcttgtacaaggtatctcccacgaaggaagttaccgttgaggaagaggatcgatgataagataggcaagagggggaatgagaaagaaatgaatcgtcccggcatagcgaatataaacagacatcaggggcaaatgggggtaagatagattgaaaaaaaaacatcaagcgaaaacacatgagaagagagcatatcacaaagcacatcaaatggggcatagagcatagaaagggatccatacacatcgctcgctagagaaaaggtccaagacatccatccataaagccgtcacgacaaaagaaaaacaaaggaaattcaatacccgcaagtcccctcagcaagctgtatggttcagtcttgtgggtgaagacaatgaaaatgggggcgactagccgtcctcatctgagggctcagcagaatccccttcgcttccatcagcgctggcgttaaccttcgttttcttagaagaattcgagccttcgccgtgagcttcacttgacttgcgcttctgcccaccattctcggttggcaatggcttgctgagatcctcgaaggtgacaggctgacccgttacctcttctcgtttctccatagcggccacttcatctgcagtcaggaaacgtccaccgggtccacgcggtcttcgcatggcgtgattgtgtcgggactcgtgcagataaggcttacgaccctttgatgtcaaacgcagctgctcctccagcttttgtcgcgctacgcgacgcttcaagattctatggaactgcttggcgtttacgtacagtggcgactcttcttggttgccgccgggtaccatgtcgggtgagggctggctttgttgtacgggagcctggggaagtggggcggcgatgggggcccggccgacgtggctcataacgggctgcgcagtctggacattggggctaccgacatgactcatgcgacgttgggaaagttgctggttttgcatctgaacctgcgatcccatcgggggcatctggttttgcatctgggggggcgatcgagggtcacggtccttcatctgcatgctcgccatgcgcggcgaggctctggaaccctggggaatctggccggccatggaatcctggtggagggggtagaattgcccagacgcagctgcagtggccatcgcagcagcctgcgtcggcgagatgccgtaaccctgacccatgggcgtggggacaccatagctttggggaaaattcatttgttggtgaacacctccgggtccattctgtgcttgttggtaatgaggttgcgacggaacgataagagaggactgatggtttgagtgagattggatgggtgcctgggcgttggagggtgaggccatcgacccaacaggaggaccggcatttggtggcccggtttggtaaggaccagggatgtgagagggagcatgtggatgttgcccgtgggcctgttgatattggggagggtattccatactggcgagtgtgatagtggatcttgtcacacgccgattgagtggatcgatctgaaagtggcgactttatatggagagcaccaatcaaaccaaaggattgctttgtggtggtagctcaaaatatgtcaaaagttgatgacgacgtctgtttggtagatgtaataaaccgatatcgcaagagcgcgcaatgagggacaagagtcaacacaggtgctggggtagacggctgatgattcgacgaatagtctgcaggctcggggagtcgcgtcagcagagcgcatcgccgagaggtcactggattggcgggtgggggtatggatccaaaagaacacaacggaaccaagcacgtacctcaaaactgcccgcgcgttctgaacaacctatataatactgtgttttcgtaacagaagctctttggtcaacctcttgtcgagaataatcccgaactgcttgtggagggttttgactcttttgtgcaagattgttacgcccactgtcgggtgtaacgtggttgggctgtgatgcagcggtgccggggggtgcctcaactatatgtcggcttgatgcgttgtcaagtcagaacagccctggcgatgggcaggttggtgtggagactacgcagtatataccaagcacggtcggcaggctacctcattcacgcaactctgagactttctctgccacgtccagcgtagattcgggcggtgctaacagcctcgacctgcgacagataaggcttgggtgttggtgtcagaatgcgcctctcaggctccacgcacgaacactatgggctagaattagcattttaacatcctagccaatgatcgcgcaaagtcaatgaccaatgcgctgtcaatacagagttcaagtggaggggatttgggaatccggggcgggttagaccggtcagggctgagaggggagacatgtatgcgttggcaaggtggatgttgagctgcagctgggagcctacctggtcgatcgggttctgcagcgcagacaaagtgacgatttgagggtatagttaaaaactggccaaagccaaggaacgaatcactttgcgcgactatatgccatgtcagatgcaactgggtacccacgagggaagatgtaaatgatagggacgcgtgcagattggacaaaaagaaacatgaaacgcgatcgcgcgcataggtaaaatgagaggagccaatgagggaatagcaaggtagaattgcagtgttttggttaagcacgcgttgttttgacacgagataaccaaaagagcgcgcaacgtgggattggagcttagcgattaccttaataggcacgacagaaaggatagaaaggataatctccgggggttaaggtgactttccaatcccaggcaatcaagggatcccagggtagaagatgatttgaccagcggaggggagaggggggagatcgagggatcgtgccaacgagagagaaggcggtggttctgtgcgtaaccggagccactgatgtcaagccgggcagttccgcaagtatacaagtaccggcagtaaagcagtcaggcagcaaggcagtcaggcagtcaggcagtacaagcgcagcgttcaagcagtacaagatgtatatagggatacaattgtagttccaggtcaaatgggcaaaacaagtaaaatgggaatacaacagaaatccaagtgaattgtgacatgtgtttacccaaggcgaattgccagatgaaagatatcggattcaaacaaagaaaagcaatagcaataaagagagcaaaaagcatacaattgcagtactgttgtggtgtagtgattgcaagcagaattgtatacgacttaccccagtttgattggtatcaccaatagagaaggaatgaccgtatgcaaggcagggtttcaccaataatgatgtaaaaaggggggagatgatactgtgcgattggaggatgaactggagagggcgggcaaccaacgagaagaggcagagggaagaaaggcgaggaaaaagggcggatggggcagttttgtaggagattgactggctgccgactgagcgaccgccttgctccccgctgctgaggtagccttttctgcggtattacgctggattacgcataattaccggttattactggtgcattcctcctgtaaccgcctaaatggcccccaatggtatcagaatgaccatactgtaataaaacaaatccggtggtcccgagctctcgtcatgtgcaacccgagactatgacgcatgtatatgttgtcgttaactatcatctcttccttacaacatacaccataatctaatctttcgttcttaatcgacttttttagctcatataaccatctactgtatagcaatttactcaggctatcctttacatcttactctactaccctcgaaacccaatcctaaccatgaatcatacctttcggctgcatctgcatgtctgcccattcgcctcattttaataatcgcctcctttcttttttggccctttttcgtcagcttgcttcggctcatgataatcaattcgaatgcctaaaacgatgcgctcaatccttctttgctttttcctattcacggtggacaccgcgtacctcggccgtgtgccctattttgggcaagtctcctccacctaatgtcccattcctctatgacccttgcttcaaagcccgtgtacaatgtacaacatagtccgaaaaaagaagagctccacagaagaggggtttgtctagtacggtctacggagtactccgtattattcacggcacttatggttctgggagtgtgatgagatctcctaggaagcggcaatcagatcatctccccgggcggcaacattgcaatccaggcggaatgacggcattaattggcacacaagaccgtccgtctggcgcgaattggaaagatctagtttagtatcatgatgtagacgttcctgaaaacacgaggtctggctctctatctactcgcttggcgcattgagatgtttgttccagccgagctcatgacgcaattcaattaaccgggttcttatctacaatataggtatagagtacctgttatgcataatatacgagactgtttctatagcgcattattggcattattattgacatccagactggcggtcgaagtaattctgctcaccgtaggtttatcttcggctcaaatatccggacctcgtgttgctgtttcggatatatgttccatgaatcgcctccgtctcaattacaacaattcaaacagagaacatcatattcttatgtacctttctatactcccgatttaatccccacgtgcattctagtcagctttagtagcgtcccatggaccattcagcacaggcgataatcccgattcgcagggacagatgggtccgatctccggaccatgaaacacccacgtgtgagaagcttgaccgcttgacttcgaacttcaacggagtttctacttctagaaaagggttgcatgggtaaattatgttcatgtagtattgataaattcctcatttcgttcgctattttggctgcttggaccgatattcgtggccttggtaccatagcaacccgcattccttgaaatatatttatgcaaccatatgtgcggagtacatgcctggcactcgagacctttcctttctgttttacgccttgcagcttttttgatcttacagtaaaattgagcacaccctgatcagattattacataagctgattaattaaccttggaaaacggcggggtgacatgttaactatatcacgtgtagccattcccatttagatcgcccatcaaaaacagactggctcagtcaaagtgaccgttcgttctagctgtcttggatatacctcagtgaaaaaccactcagtagagctatttgatcgacttaccatttttccattttagcctatgctcctgagcatagccctcggaatccttcaaatgactatatattatcggccatgtcgcgatcatcaggagtctcgcttctcatttttcagtctttatcattccgatttgatctataagtatcctcttgccctggatctgaattgtgggactatgcttctcgctgtcgtattgttcaatggccttcattcaacaaactagggatagctcgtacgttgaggtggagttgcgacatcctgacggattctctactagttaagcatcagtacgatgcctacgttggattaagcaacaccggtttcttacacatttaagtttgaaaataggctaatgttcttcagccccaaacccattaatcattcgcttactaaatccgtgttgctgctatcctgagggaaacttccgcccggtggagcccctccgttgtgagcggctgagccgcaatacatctaaccggttcggtggagagcaatatccagggtcgcggatgccatggcgtcatcgaagcaagcgtcaatacctgcttagcatagacaacgaagatatataagaactatttgctttacttacctctcccatcttcaactcttcaactcctcaaatatctccctatcacaatactgctctcgactacgtcactttcaaatatttatatattaccacactcatagagaaactatcaccatgtcagactctaccttccacaccacaactcaggacatccgcaaggccgagtccaagcttgcccagtcacacgatggcaagcccccagcaaactccgacgtctctcaaaccaaggtgagttatctgtactgaattatcaccaagcataaagcagacctctgacacaatccatatagtccatcattgaccaaaacaccaacaagcccgcggaaatcgagaagaccaaggccaacctgcctctgcccgaccaacccccggttgccagtgactttaactcccttgaccagcgtaccactaatgtgggctctgggcgtttcgagtaccctcctgataacagtggcttgcgcgagggtgcagctgctagcagcagcgcccgcattgatggaaaggagctgcacaagagcactgccccatgatttctagggttcgttatgtatgatagtcaaatttttatcaagcattatgaccaatagtttgaatattattattaccatgtgacgataatcgcggtaaaatcggccgattaatagtttacttggagagaaccatggagagaaccaatgaatagtgcaaattcagaagtggctatattttcggccgacagtgtctgaatgcgtcagctaaactacatgtgaggtcatacatgtaattaccaaattggtgttcaaattatagtaaaagttggcattcgaacatatcatttcatttcaagaacattgaacaagattagcgtagggcagacctgacaccacccagccgttgggaaaaacgacggtatgtcagccgaatggttgacgaatattccaataataacaggttaccaagtcattgtgtcaaacttccttgaaacgtcgccacattacttaaagtctggacattctagcctccacaattatagcatatttattggagcttaggactcgactgatttccgaaaacaagatgtgatatagcttttccaagttgatatagaattggggttatttcgatgtcatcatcataacgtcaacattgggtacaagagccaaggagtttgtatacaaagccgacaatgaattcttatacagagaactgtaatccttttttctctatccaactgaagtaacacaatggcctccaacactcaaaaaacttacaaactctccactggtgctcagatccctgccattggcctgggaacctggcaagatgaggcagcccaggaggcatcagtccttgtagccctccagacaggatatcgccatatcgatacggcaagatggtaagttcctcaacaatttgacacgcataactagtctgacccctatagctatggcactgaggctgctgtcggcaaagccatccagaaaagcggcataaatagaagcgagatttttgttaccagcaaactgtggaacaacaagcaccatcctgatgatgttgctcaggcactgcaggatagcttggatgatctgggtttggaatacctcgacctatttctgatgcactggccttgtgccttcaaacgaggagatgatccattcccctctgacaaagatgggaagctgataactgcagatatcgactacgttgatgtacgtgctactttaaaccaatggcaaggctatctactaacaaatcaaagacttacaaagcgatggaagatctcgtcaaatccggcaaagccaaagctatcggggtttgtaacttctctcggaaggaaatcgagcgtcttattgcgaacgcgacgatcaaaccggcggtgcaccagatggagctgcatccctggctccagcaaagtgatttctatgacttccaccgcacgcatggcattcacgtaacgcagtattcccccttcggcgaccagaatcaaatctatggtgcccaagagaaatatggtcagcttattaatgatgagaccttggtcgagatcgggaagaagtacggaaagacgtcggcccaagtcgccctaggtattttgcccctgctcgcccggttcagaaatacagagctaataacttttcatagtttggggtatcgaacatggccgttccgtcattccgaaatcaaagcatccagaacggatcagacaaaactttgatatcaatttcgaattgaaacctgaagatcttaaaaagatcagctcgatcgacaggaagctccggttcaatgactcaagcaaagacttcggttacgaactcttcactgatcttgacggaaagcagaagtgaagtaagtgtgatttagagattacggtctttggaaacactggctgaagattgcctatggaggtgtcggtgttgatgcctgaagatgcgtgaatgttgctggcagaaaatatgaattattataacagaggacatacatcctataatctcttcaaggccgtcattaatgacttaagaaatgggttctaaatgtgaagctattcgtacctacatatacaaatcgggattggggcataatagacggccaggtgtattaaaagcatcaaggatggatggtgaaggttacgtagccagtaaatcaaaatacgcaacagtacggagtacaagataacatatattgaagtccggagcatagtactttgggccagaagcaatcgattattaggtcgctggattagattcacctagttagcaaattaaccgtcatccagtatgtgatccacacattgagccaaacgtccattaagggcgggaatcggcaatattaacccttcttgggtgtgttgtccattacatagacctccggaacaatctgtttttttttgaaatcaagggtttcaaaaaggtcgcagagcttctcagtgagagtttctgagaagttccttagtcagaaaagaaccataggtaactaaagtggattcgtggagatcttactttgtcgtgtcgccttgtgtattttgatatagttctcagcttcctcgttgttcgcgtgttgcggtatatatggatatctgtaaaacgaggcgcgttagtcgtaactatcaaaccagcattagtggaaatcatacttgcgacgaatccacatggcacacaagaaaatgagagctatagttagaggaatgccgaggccaagagatagcccaagagcaagcccccggtttatagctggtggactgtcgtggaaaccattttcaacccttatagaaagggcttggtactttgcattcatcgtattgacctctgcggtgagggcatcatgaaacttgccagacagaacctcaagcgctccttcccaatgactgatttttgcaatatcctcgtcgatcttcacagaaagagcggtaatatcctcgcgcatacgactgttctctttgttaaaatcatcaaacctcctagaaagagattggaaatctgtgctcgatccatcagtttgtgaattgttgccttggtttgtccttgcattgatagtgttgatttcattttccaatctctggcaccacgaccacagcgtgagaatattgtcgtcggtcgtgtaagaggagaacaccccacccatgttgtagtagacgcgggaatcaaaaatcggcgcagaaagatgaatttagtaaagaaggaggggcaagcaccttggtgaaatcatgcataaccgtttgattgccataagagaaaacttagaagaatatgacccgggactcttcataactctatttccgtccacgtatgagcggaaggtgtttgagatattatatacgctgtggttgggtcaagcttagtacaatgaacacaacaaccactgagcaagaaggtattagcatagatacccaacatagacggaaaaatatcttccacactgtggacttctcgtggatcgtaaggatataatgtaggataccacccgcgtaacgctcataatgaggtaagacatattggtaaccatccatgatctcttgggcattcctttggccaagtacatcttctatcaatcccttcacaacgaaaataaaatggctgcaggtcgatcttacccagccgaacatcatggtaggcataggggtagtttccccgaggatatatacctcgaccaattgagacgcatcgacatcaagggaaggagcaccttccttacgtgaaagatcttgaacttgatcgttccgaacgttcaaagcatgatcctcaaccggcaaacaatctatccgaggacttactattcgaaatcgacgccaataacttcaaacacgatttactcgaccctagcgtcgaccttctttcgtttatcctcgttcgatatcgaagaaaatcttctgttgaccagaatggcaactccagggcatagcgcagcggtcgagatatttgcttccaaattgatggtgaaattggctatcatggaacgagagaccgctatccaagggttcccaggagtaacgatcacagtcggcaatagagggaaacaacatgactatggatggggcccactccaccggcctggccatggccgtaagcgatggtcgttcttgaagttgcggtgtcggagtctaaagccaagctagagcgcgacgtggagttttggttagatccggccagaggaaacgctaacatagcgttaacgctagaagccgccagaaaaaagccggtcattgacaagacattccggtttagattctccgttgatcattccgtttgagatcctgatgcgacgaccaagctcctctcggaaaccaatgttagcatcggcatgcaagacctcaagggcattgtggaagggatctgggctgcccaagatttccgaaggggcgtatatacggtgtacctatgtccaggtactccgtaccttgtcgcctccacctgtgcacatgtctgaaacgcttactcagcaccacccactccccgggcccggacacaagtggctcttccacatgttgactccgaccacaattgcattttgttttgctttgtgcctcgagaaaaccgactctgtggctggtttttctcggtggcctactgctaatcctgcaatatccaggcttccccgcgcatcaataacccccccacaaaaaagcaccacggacgcgcaacatcaacattggaccgatacatgacgtctttgttgacacctacgattgcaacctcgctacgaagcactctcaaacgatcacgaacagcctagctacagccacctccgcgataattaccctgggactgaccttcaagctgcgctcctcgcggagttcgcgcatcagtatacccctgtcaccacttgaatcctactctaggactccggcttttataaacgttcattattgacgaatacctcccgtgcatgggttagagagcaaagatggctccaggcggcggtggaaatattaaggtggtggtgcgggtgcggccgttcaacagccgaggtgagtaaatatcgagggatggattcgtttttgagcctcaagctaaccagtctgtcattgtgcagagatcgagcgaggtgcaaaatgtatcgtgtcgatgaaaggcaaccagaccgtgctcactcctccacccggcgcagaggacaaatcacggaagggtgggaaaggtgttagtgaagggaacaaggtctttgcctttgaccgatcatattggtcctttgataagaaatcatcaaacttcgccgaccagaatgacctcttcgacgatctgggttctccgcttctggacaatgcttttgggggttacaacaattgtatcttcgcgtatggccagactggttcgggaaaatcgtactccatgatgggttacggcaaagaatatggtgtgattccacggatttgccgatcgatgttcgagcgcattactgctatccaggcggacaagtctttgaattgcactgtcgaagtgtcatatctcgaaatttacaacgagcgagtacgcgacttgctcaacccgtcgaacaaaggcaacctgaaagtccgtgagcatccgtcaacgggtccttatgttgaggatctggccaaactcgtcgtcggatgtttcgaagaaatcgagagcctgatggacgagggtaacaaagcccgaacggttgccgcgaccaacatgaacgaaacctcaagtcgatcacatgcggtttttaccttgactctgacgcagaagagacacgacaaagagacttcaatggataccgagaaggtgtcgaaaatcagtttggttgatttggctggttcagaaagagctaactcgactggagccaccggcgcgcgattaaaggagggtgcggaaatcaatcgctcattgtcaacacttggtcgtgtcattgctgcactcgctgatgtctctgccggcaagactactgccggcaagaagaagaatgcatccatggtaccatatcgtgattcaattctcacatggttgctgaaggattctctgggcggaaattccatgacttccatgattgcggcaatttctcctgcagatatcaactttgacgaaactcttggtactctgcgatacgctgactcggcgaaacgaatcaagaaccatgctgttgtgaacgaagatcctaatgcacgcatgattcgcgaactaaaggaggaattagcacagctccgatcaaaacttggagggggagtagcaccgggaggagcagctggcgcaataggaggtggtgtcccgcaggagtactaccccccagataccccgttagagaaacagatggtgtctatccaacagccggatggaactgtcactcaagtcagtaaggcagagattgtagaacaactcaatcagagtgagaagctctacaaagatctcaaccagacttgggaagagaagctgcaaaatacggagcttatccacaaggagcgtgaagcagctttggaggaattaggaatcaacatcgaaaagggcttcattggaatgagcacaccaaagaaaatgccccatttggtcaacctcagcgacgatcccctacttgcagaatgtttggtctacaatatcaaacctgggactaccacggtcggccatatggatcaaggtcaaaccgtcgagattagattgaatggatccaagatccttgagaagcactgcactttcgagaatgtggacaacgttgtgaccattatacccgccgaaggcgctgctatcatggtgaacggcctgcgggttgacaagcccacacgactgaagagtggtttccgaatcatccttggcgattttcatattttccgtttcaaccatcctcaagaggctagagccgaacgggtcgagcagagcttactccgccattcagtcacaacaagccagctcgggtcgccggccccaaacaaaacccatgatcgaaatctgagcaaggcaggatctgacttggatggcgattcatctagggcggattcacccatgccccaacagcgtagtcgtgagtcagactggttcttagcacgcagagaagctatcagtgctatggttggacctgatcagatctccaatttgcctgatgatgaactggatacactgttggaagatgtgcagaaggttcgagctgaacgacgtggactgccggaagaagacgattccgactccatcagctccttcccaactagggacaagtatatgtccaacgggaccctcgacaacttttccttagatactgctataactatgccaagcacgccccgacagaatgacgacgatgaagtcaatggcgttgcatcatttaaccaaactcgacaagatatgcagcggcagttggatcgtcgcaaggaagagttccaagaaaaactcaagaccgtgggagcttcgtctgatccagaatcgccggagctacgcaccgagaaggagcgaatggaggacgctctgcggacggttaaagaggaattcgaagagcaactgcgcaaacaaaaggagtcttttgaaacccacatccgagatatgggtaagccagtacctcaaatcttcgaaaatggcttcgccaagttagatgaacgtgaacttgaaatcgcgcgttcagtatacagccactggtcccagcgaaattatgtccgaatggctgagaagattttacaacatgcctgccttctgaaggaggcacagatcatgagtcatatcatggacaagcatgtggtcttccagttcgccattgtcgaccatggccacaacatggaatcgtcctatgatctcgtgctcaacggaatctccggcgatgaagacatcctgcttgatgaggccaagaaaccctgtgtgggtgttcgagtcatcgacttcaagcagtgcgtaattcacttgtggtcaattgaaaaactccaacgccgcgtccaagccatgcggcaattgcaccaatacatcgaccgccctgactacattcaacacttcaaactcgacaatccattctctgaaccttgctcaccccagtattctcttatcggtgatgccgacatccccttaaccgctgttttcgaaactcgcgtgcaagacttctccgttgagataacctcaccatatactcagagtgtcgtcggaatcattcgtctctctctcgaaccatcctccgcgcaggcgccctcttcaaccctgaaatttaacgttgtcatgcgggacatggtcgggttcgcagagtgggaagggactgatgtacatgcgcagttatttgttccgggtatctcagaggaaggaggcgcaactacaactcaaatgatcaaaggatttgaggacggtcccgttcgatttgaaagtgtgcacagtatgagcttgccgctgtcaagtccacggacagccgcattgaaggtctgcgtttatgcagctgtgacatcggttcatctcgacaagcttcttagttgggatgatatgcgtgactcagtggagccttcaccgcaaaagcggactgctgctcggatcgcggaatcagaattttactcagaagaacgtcatgacgtctttgcgagaattcagattctcgaaatgtcagaatctggcgagtacctccccgtggaggttgtccaaagcagcagtattgatgccgggacatcccagcttcatcaaggattgcagcgccgcatctcagtcaacatcacgtacagttcaacagaaactcttccatgggatgatatcaacaacatccgcgttggttctgtccacctcctggatccttggggcaagatcccagatcaggatttccagactccagacgtccccttgaagtttgtccaagaaccaacggtcaaagaaaatgccgacggaacctctcatgtcacaattgtcggccagtgggactcgagtttacatggctctctgttgcttgaccgagtgacagcagaaaagtacagggtccaagtaactgtccgttgggatcttgtatccagtcgtttacagaacccagttgtgttcgaggcagagcaaaccattcaaatccaaggccgtacccatgtccgccaacagtcgatgttcaagcaattctggaactcgattcgtgttgtgcactcgacgacttgcatgtactccttggttattcggcctatttcagctaagcgtgctgctgatctgtggcgtatgaacacacaaaatgactatgtgaaaggcgaggagctcttgaacacctgggcgcctagaaaagtttctctggtacgagactacattgccaaccgcaaacgccggcagcggctggcagagcttcacgcagcccgaggtgctctgagcgcgggctgtctcattccatcgctggctcgtggtgggaggtcaactccgatgcggggtgcagatctcaatgagcgaaaatccaaaattctacggaagtatcttgatctgtggtcgctcaagcaggacccaacagaggcaatcctcatccggagtaataccgaacccccttcggacggagcggcacacattaaaaattcggatgccagcggcctttatgataaactttctctcaaacctcgcttcacagccaccatccaaacccttcccaaagcccccgacgccttaaaaacggggtacgtgcttacgcccgatgataccaacaacgtttgggtgcgtcgtttcttggagctccgccggccgtacctccacatctactcggtcccagagggagacgagattaacgccatcaacctccgcaatgcgcgtgtcgaccatgcgcccgacttcgcaagactactcgacggttcaggagctggatccgaccgttcgctgtctgccaagggacgaccgaatgtgttcgcagtctatggaacccagaacacgttcctcttcgccactagaaccgaggcacaaaaggtagaatggatcttgaagatagacgagagctacttcaacagcaacagccccagaccccccgccaatggcgaccattaaaattttattgcggttgccaactgttgtgcgcggacatgtccgtggacaagcttcagctttgcttcccctgcttcgtgtttcattattacgggtctaagtctacctttacctttacctcctactttattctttcgtttgcccatttcctttcatgacctgttgagataccccttgcatatatcgactcgctatggcactctcgctcttatgtacataataatcctatctggatcatatattcgattgtgcacagtttgtttcattttggaaaagatcttttatgcagtttgacctgcatttctatttggtagacaagaacgatataaatatattttgcgatcgagatagagcctactggtctacctgtgcccattacctattaaattcaatcagaatatgtctatgaaccctcagcatgtagcccacaggacacacaggaccgttgccatggaaacaatcagagcacaaatgacatcaacccacaaaataactaccaagtcttcatctcttctaggctgagaactcatatggaaattgaagcttaaacattcgaatgggcaaaagtgaaattgttcgagaaagaatgttctcccaacgcccttcattccgctacctggctatcggcgcagtggtgtctctgtttgtccttgcattccttgtcctcggcacaggtgcaccctcgctctcatcacaatttaatctaaagacacaatcacgacagcaatactgtgcacctaccgtgaactcttccgctggctgggagtttgttgttgagcgcgatggaaacaaccacggtctctctgaggaccagtgccgcattgctttcccaaagctgtttgttgagattgacaagtcatctaaagtgaaagaagataagcttgtttcctataaggagctcaattccaggacagtggatgatggtatggtacggggaataattgatcgaggagaggtgagtgaaatattgacccttgtggacttgagagcatctgattctaatatatggtattcagttatatattgtcgactacgcccccatgcctgttacagcatctcgagcacgcgccacattgaactccctccaccgcgccctgacagcattcccagaccgccacctcctacccagcgtcgagttcatcttcaccacagaagacttcgcagaagacacaaccgccccaagtcccatctgggcctactcaaagcgtgactcagacacctcagtctggctaatgcccgacttcggttactgggcttggccagaggtacagattgggccgtaccatgaagtgcgccgtcgcattgccgcaatcgacgacggccagactgccgcagatggcacatatattccgggcctgcagttccaggagaagaaaaagcagctcgtatggcgcggcagtctggcgacgaacccgcccgtccggagcaaactcctcaagtctgcgttgggacgtagttgggctagtgtgcgtgttattgactgggatgatcaaaatgatatccgctttaatcttctgcccattgaagaccactgtcggtacatgttcctcgcacacacagagggccggagcttctctgggcgtgggaagtatcttctgaactgccgttctgtggtcatctcacatgcgcttgaatggcgcgaggctcatcatgcggcgctggtatcaactggcccggatgcaaattatattgaggttgaccgggattggtctgatctatcgcccaagatcgattatctcattgataaccctgcgattgcggagcgtatcgctaataatgcggtgcgcactttccgcgatcggtaccttactcctgctgccgagtcgtgctactggcgtcagttgatccggcagtactctgcagcttgtgatttcgagccggtcttgttttcgactggccgggatggaaagactcagccccggggtgttccgtatgatacttggcttcttatgcattgatgatctttgaatcggttgctattgattgtgtttttattgcatatcggtgtttttctttttgcgatattcccggttggcgttgaccctgatacagtttcaatttgttttgtacatgagatatattgattatttatgactgaatataatgcaaactagaatgcaatttttattatatgaaaacaagtatttcctggtttatattcgggggagtctagtagtaagtatacctttgccaagccttgatgccaagacctacatgaccgcaatattcttggcacgtgctcctgcttacctacgcaatcgccaagacctcgggattcgaaataaacatccgctgatccatggatcggtcaccttgtcacgttttcggtgactttatgtcgatttctctgatgatcaaaatacggtagatgatcatgcatcttttttttttgccggattttatattgcctgatatcaagtttagcctgggctaaccccagctacacctattacagcggtgatggatttccccgcatttgcacctgtgcctgtggctgacatcttcaacattcttgtcttcattcggcgacgaactttagccgcctaaagggtctggctgtaagtctcttagcttggatcactgataaaccaaattttaggctggttgaatgatacatggatttaattgaggtgatggactaccgctaagacttggtaggaaaggaatcatggtccgtggatgattggtgcaattgtgactgctgaagtacgggataaatggctcgctggctaaattgaaccaagacattcaggatatgaaactgtttggaaacacgccccacatcctcctgtgaatataaaagctcttctcctgaagggattctctgccataaaataacatatctcaattcattcgtcttcttcaattatcaacaatatccgacccttcattatggtctctttctcaagcctctttgtggctgcttgtgctgccgtaactgcctttgcgcttcccagtgagctggaaaagcgagcgatcaccacgagcgagcaaggaactagcaatggctacttctactctttctggaccaatggaggtggcagtgtctcctataccaacggtgcttcgggccaatacagcgttagctggaccaactgcggatctttcacctctggcaaaggctgggctactggcagctctcggtaagtcgagtccacctagttttctattgtccacatacttacagtacaccatgttagaaacatcaacttttccggttctttcaatccctccggaaatgcttatctcgctgtctacgggtggaccactagccccctcgtcgaatattacatcctggaaagctatggcacctacaacccagctagcagcatgaccttcaagggaactgtgaccagcgatggatcagtctacgatatctatacacaccagcaggtgaatcagccttctatctcggggactgcgacgttcaaccagtattggtccatccgccggactaaacgcaccagcggaacagtcactactgcaaatcacttcaatgcttgggcttctcttggattgagtctcggctcgcataactaccagattgtcagcactgagggataccagagcagtggatcgtcgtccatcaccgtttcataagcgcgtgaaagccctgcagtggcttcatgcgaaatgttcacttgctttggcaaatctttattggaagggctattcgatgggcctgttaagtctcattgtagtaaggaggtggaacgatactttgcttaggggaacacggacactttattgtctttaggcttatacttgtctatatataggcactcttggttaatatgacggtgcttttagcataactaacaaggcccacaagtcggccactttgaatacttcaacttctctttactttctctttcttcttccttctgtgatatttgtaggaaagtatggcattggtattgcctttacgttcttccttccgtccttgcctacatatgtctgttgttagcacaacacgcagtctaagagaaggaaaaagaggaacatacctgtagaggaggtagacaacaagcataaaaagaacagcggtaatacaatctggaatatcggctgctgccgctgtcttccagtcagacggggggtagttgatttttgtcttcgcgaggaatcaatgtatttcttctcttccgaatatcctgtaattggctttgtcggcctcgctcaaggaggtcactgtttctctcttccgtttcttgggcacctccggtattcccgtagacactgtcctctgcgggatcgaaaataggataggcttgtcacgctggattcctaggatcgaatcgatgtccaaaatggtatcatctcctaggcatttgtttgcggtgaagtcataggactgtttcttcccgataggttcaaggtagagggtgaaattatgctttacccgtgtccccactgagagattgcgtgccgtggaccatcagtatttggcgccatcgggttgacaggctgagatcactcggccaacttgaggttttctggaaaggtagagtgagtacaagccccagggtaggcgaaaacttcggcggggaccccacaagtccccaagcttctcaccttcctatatattgaggcttactgtgcgtaagtagacgagaagagggagagttgagatgtagtctaacgaggggtgagtacttgaggcacctagatggcgtcctgagaccacaaaatccaactgacgggtgcccaatcaaagggatagagagagaaagagagaggatttttttctgcaaacaaacagagaactacttatgtagctagatgaagcttatcaaacaggacaaacatggcaggctatttaacagatactaagctctctccactttctctcttccttctcctccctgtccactctcactctgacgagttgaagcaccttttttctctctatatatatgatcaccatcgtatttaggctctatctacttctcagcctccatctacccacggtctatatgcctgccctcctcccactttctttcttcttcacggcactcgaaattcattgcacatcgtgcttctctaatgagcacattcagcggcgacgagatcggcgtttaggaaaggttctaacataacataagccagacaacaagtgccgtgttcggctcgcaaggctataacattgcatttatagactataaatgctctggaaacataaccatgacgctgtaattatggataggcaggcaactatcaattttgttagtgggtttaaggctcctggactctgatgcatgacttgacggatttgattgacaatgcctggaagaccggagttcagaattgcaatcggacgattcgcatgttatatgaaagatctcaatgtcaagtatgggttcgtttccacgtacgaaaaagccgtcttgcgcgtcttctttcatcgacaattaagcaaaaatcccagggtgccgaaccgcctatcgcaccttcccgttttgaggttcagatcttgatacgccccgattcccacatatatcaccgaaattgttcctattctaggaccataccatttagcgtcgattacagcgcatttgaatgatggactacacgactgcctggaggcagaaaggcaatgatccgcgatgcctagtcttgaattcgacggggacatgatacggaagcgatccaagttctgctttctctgatgacggaactgataattcgcccgttggacccaccactgagaactacgttcaggctacatcctcatgcgcaatggaggcggagggtatcaagcggctggcaaagcgtttgctttgcgacatgcttgggctcatcaaaagatgtgccaatcttgacgatatggaggaaatcaatcaccttcgcctcaccggaaaaatccgttggtccgaaatgttcgaaaaggaggacgggttcatctatgaatagactgggaacatgggcgaaaagctgtgtcacagagtaagcctacccaaagcgtgggaatgctggctcagccgagacggtctcggtgatggttgtgatctgggtatctctcaacacgatgagtatgagagtacctaagagcgaagttgtattcgaatctttgcttgttcccaagtggtccatcattggtttttctctggtgcttgcggattgttatgttgagtgtagccgccttggaaccaacctctataattcagtctttcatgtattcaatccaaattgactcgtactcgtacaagtagcctcggttgtctctttctagttggttctagtgcttggtgcttatatttgaatgtgataatggcaaacctacttgaaatatatatcatatccatcagagaccatcacgtacgtacataaaacatcatttagaagatactatgctctatgaacatgctctagtcagctcttcgcgcttcacaacaataatatgagaatatatataatgtcgaacttacaaattcttgtattatttttatatcccctttaagggcctcttgcgatgcactaggcacattattcaacccccgtgccctttgacctccacttatgtacacatcttgtgcgcacattacataatttatattcccaagatcgtgtagtgacaacggagactcattccagctggctatgtccgaccggtgttctccgcgcgtggaatggtttcgatcatggaagttgggcgtgacaccggaggagctagaaggggactgcttgctgtctggcttggtagatatgatagatcggaatggaggtagggatccgacgatgatagctgtcttgattggtattaggattctatagtagatgtcgagcggccaacttacagattgacgattcaaccacactccatactgcaagtgctgcttggtccgaatatgcttttccggtgatagcaaccgctcggataattgccgctgcgataactatgatcccaagacagaacactatccctaacccgatcttttgttgcatattgatctttccatgccagatgattcgaagagggagtgacatgactgtttaatggtattaaatcaagaattgacacgaaagtagatggggtctttgtactcaacaagtccgtaaggatatcgactgcggtgctatatgatatggagataacagatcctctctgatcaattggctttgagcatttccctaccaattgttagacatagaggctgaaggttttaagaaacgggttgtctaccgaacttgaagtaattagatggcgggtgacaagtgtacaccgacccaatccaacatccgatatatgccaaggctgcgaacacaacggtggcccaccagacccgccggtaccgaggcaacccattggatatcatccagaagagtgctaggaatgaggcttttacgctccatagcacggaccagaatattccaatgatcgcaaactcgtagtgggtgtagcgaagtccgtggtcgacaatatctggcccggtcatattgaacactatataatagatgtgtggagcctgcagagtctgtaatactgcgttcgttatcaaaaaagccaaggcaagcagcatgaaatagtcatccgctagtagacgcttcacatacacgattcggatcgcgatacgagcagacgtaaacaggatgcttactcctgttcccgtccaagtgatagcaatgaggccggtcattgagagttcagttcccatcccttggggagtgggaagaatctccatagtcatgacgcagcactgtatgtagactttttgcctagtaagtgacaacagacaggacgctcaaattcgattcatggcgaataggtcatgagggggtaagctcataaggtaatctttccactcatttgtttgtgcacaagctagctgggaaggactgtgataggctacaattacttggtttgtaatttaccgttgcgcaaaagaaaagaccagggaaccctgccaatggtgaaatcgacccaaagagggggtaaaacgagggtaacacagattagatgaaacgaattatgtcgagtctgcatggtaatcctccgtataactgcacccatgatgttagtaggacaccccgaataccccgagaaactatttataaccctcacttttggatgaatcgagattttgcctgtgaatgaaggtgattgcttgtttattgggtcatcagtggcccagggcggcgacatccaaagcgctgagatatgcagcccggatttaaattgagcgacctctcaacccctgtcgttgtattcgaaattttcgttttgtccattagaaaagagactccacaaacagagtgactctgcagcgtttttttttttttcgctattagactttttaggaatcctagaataggtgttatacctgataggccgttcctcgagccctttaagttagccgccgacaattgagacctatatccgtgatctgaaagttgttgtgattgtccagcttttttgataatcacaaaaagtacacctaagatgactcgacgcagggaaactcgcgtttgtcatgcaggttaccgggtagccttccacatgacaccccaggaaaatgttcctgtatggttagaaagagatcatgtctaccgtagataccttcctaagtccaacatccaagtctacttttttagcaagtctagcgatggtaccaaagctaatctcgttgttgcaattcgctggtttaacgtatgcggcctttcaggcttcatgcaaatgcgtaagcgaaaaacaacacgaaaaacatcgacttagattaactcactatctagaccccaggagatccatgttggccctcattgagaatatgggaatccctcaatacaacagtatctggaaagctggtccgcaatctcccagtcgctatctcatgttaccccggcacctacgaagacgaggatgaatgcgcgtatgtgtattcgcaatggtcgaattccactttccaacaactttcccccgtcggttactttggtcctacagaagatgcttgccctccgattgacatgcgccatcaatcacctcgcacatgtacgcttggtccagctccagtgtataccatcaatgcaacagagcctgaggaggtagtagctggtatcaaattcgcacaggagaatcatgttcgcctcgtcattaggaatacagggcacgatatgttggggaagttagtaacacacgatgattcaacaaaggtactattctgactaatcacttcgttgtagatctgaaggctatggaggactacagatttggatcaagtacattcgaaagggaatatctttccaacaaaggtatactccatcgaatggatgtaggagaagcaattgggctggctctgcaatcattattggcggaggctatgtttggcgagatgtatacaaagttgcctttcagcgcaatctcacggttgttggcgggggagacccggttggtgaaattcttcccccaacaaaaagcaaagttctgattttgttccaaagaccgttggttgcattggaggttacacacagggtggaggacactcgccagccagtcatgactacgggcttgccgcagaccaagtactagaggcccaagttgtattggcaaatggcgatatcgtcacagcgaatccttgtcagttttcggatctgtactacgctattcgaggtggaggtggtggtacttacggcgtcgtcacgtcgatggctgtcaaagtatatcccagcaagcctgttgtcgcacagtcgctcgaaatcactccactcgccaacgacacggactcactcttagacgcgattaccgatatctaccagcaatatcccaatatcatggatgcaggattctccggctatggatcctggtctattaacagccctatgatgaaccaaacacctggctatatgcatgttgttgcggccatgaacaagtcccttgtccagtctttggaagttttcgatacacttttccagacattgcagaagtataacggtacactccttcgtatatcagttatatggtatgagttcccaacgtatggggcatacttccactccctctctggtatatcccagccagtgagggctgggtctcccaactcggctatgacatcacagatgtttagcaaagctgccttgacgactagtcgcccttcacttcgcaacatgattggtgtcactgcgggaaattctgaagagtgtgcattggctaatgttgagctcgtcgggggtggaaaggttctcactggagcatctgacaagtactccagtgtgaatcctgcctggcgatctacctatattgtcagcgtcgtggctagatcttgggtgaattactcatctgctcaaactgtcgaacatgatatcactcatatcaagggagctgctatgagagcgctcgatccattccttggaagctacatgaacgaggcatgaatattcttcttttgcggcgaattaacaactttactgactgtaagaaaggctgatcgcaatgatcccctatgggcgacggatttctatggtacaaactacgtgttgttagcgcgaatcaagaaaaagtacgatccgacgagtctattctactgccagacctgtgtgggtagctcatcttgggctcagcgatatcttgatggagcaaattacggccctctttgttccactgggctgtgatgcttgatattgaatgagacggcattaaaaatccgcttgaaaccttgccactgtctgatcagcatagtcacttttaatagtctagcggcaatagacatcgaggttaccatggatatgttcttgaacatagggataatctccatatttcccttaaatgacaccaagtcagtccagtaccgtttgcctaatgagtgctatggagctgtatggattttgtaagaaacgactccatagatcgttggtaccttccaggtcacttccagtttgctatttgcttccttcctttgttcatttatttgttctttcctttccagggttgtttgcactcgagctaagcgagacgttcgagttttgcatcgtttgcaataaaaccagctatataaacaggccgattcccacttctgtacttacttcttctctctcttcatcatattggatgaacccaaccacatcccacatcccacatcgtgttcatcatccatcacatgacttgtctgttcttactttcatccttcagccaacccaaccacattgtccttctatcttctaccttctaccttcttccatcatccatcatccaccatctatcgtccatcttccactttatgaggtttgtttctcatctgtgttatcacctactcttcatcatccatcatcgtggtctataatacctgatgacatggggctgactgtactagatatgtgtgctcacatccactcatccacttcatgcatccacttcaatcaaccatcgacattcggcattcgactactgcgatgcttcgaccttaaaagaggaggaatgaaaagaaacggtcttgaacgacagagtctccgcaggagtgtctctgaaggagacttctcgtcgggaagaggttacagcgtgtacccatttaaaggagactctcaagaccgtttgctgtggtggtataaaaaaatggtcgcctcgacaagcatgcatcgacatccaagaaccacatccaagaaccacttcaatccatccacttcaatccatccacttcatccatccacttcatccatccacttcatccatccacttcaatcaaccatcgacattcggcattcgactactgcgatgcttcgaccttaaaagaggaggaatgaaaagaaacggtcttgaacgacagagtctccgcaggagtgtctctgaaggagacttctcgtcgggaagaggttacagcgtgtacccaattaaaggagactctcaagaccgtttgctgtggtggtgaaagtatggtcgcctcgacaagcaaacattcacattcaagtgtcgatttccaaattccacttcaaccatttacttcaatcaaccacattcaatcgaccacgttcaaacatctacttcaagcaaccacattcaatcaaccacattcaatcaaccacattcaatcaaccacattcaatcgaccacgttcaaacatctacttcaagcatctacttcaatcaactacttcaaacaaccaatttcaatcaaccacgttcaatccttcaatgaaccatatccaagctccacttcaatcaactatccaaattccacttcaaccatattcaaacatccacttcaagcatctatttcaatcaaccacattcaatcagcccaattcaagcagcaacttctatcaaccacttcaagatcctacattcaaagcatccgcattcaaacttcagtcaaccacttctatcattcacattcagccttactgtgatgggtttcggcttcaggaccatttgcaggcttgcaacaacagcaaagacgaaaggaaaagagaaaagaaaagaaaaccaaaagaaaacatctcgaatgatttcaatcagctacttcaggatcctgtatcccaacaaccacttcaatcaacaatccacattcaaccatctacaatgcttcgacctttaagaagaggaatgaaaagaaacggacttgaacgataacagtctccgaaggagtgtctctgaaggcaacttctcgtcggggagagggtacagtgtgtacccatccaaagcttcagggcaattggcaggcttgcaacaacaatacaaaaacagaaaagaaagaagaaagaaaatacctcgaatgatttcaatcaactgcttcaagatcctgcatcctaaaaaccacttcaatcagaaatcaacattaaaccatatctacaatgcttcgaccttgaagaggagaatgaaaaggaacggtcttgaaccacaagagtctcggaaggagtgtctctgaaggagacttctcgtccggaagaggttacagcatgttcatttaaaggagactttcaattgattcatttattgattctacctgagtttaattcttagctgtggtttatgcctatagaaaagactatgtatatatgctacacaataggctgctacaaggaatgttacgaatggagccattatctcttggcttcagttcctcagaatgttactcttcgaaaaaaaccgtagatccgatctccagatattattatggcctagtttagactgtccgacgtctcgtgtccaccggaatgagggagtcatgtgggaaattccacgccatgcttagacgaagcaactgaactcccaatatttttctttctccacccgaaggagtttagtgcagatagcagattacagcgaacagcatcaaaatcgccctggaatgaagcgaatgtaactaaaataccaggaccttctccgtaggaccggagaattgtggatttcaagggtgttgcgtaaagccctcgctcttgcaagaaaggatcggcggacgcgcggtgttgttgggcatggtccgtgccctctacgcctgaggcatcaatataaacttgatcccaccgccgaggccgaccttcagatcgatctttcgtatctccaacaacaattattgagtgaaccatacaaaacccacaacgatcaagatgacctcagcacctagagatgcactggagtttccagattcagataggggcttcttagagcctcatctacctcctcgggatggctcggcacctgagtctgatctccccttcacaacactcacattcgcgacctcgcttgacgcttctctagctctgtcccctggtgcacgtacagttctttctggaccccaatccaaggcaatgactcattatctgcgatctcgccatgacggaattatcattggcgttggtacagcagtggcagacgatcccggtctcaactgtcgaatcacaggagttgggggttatggcaagcccggcctagatggccagcctagaccagttgtgattgatccgacagcccgatgggacttttcagacgacagcaagctgttccaactttgcagagaggggcgtggccttgcaccatggatcatcaccgcagttgagaaaccaaacgccaagaaacaagcattactggaaaaatacggcggaagatttatcccagtcaaaatgcttagaacccacaccggccgacatcaggttgactggccagatttgctcgtcaccttgaaatcgaacggtctcaacagcgtgatggtagagggtggtggccaggtcatcaaatcccttttgtgcccgctttacatgtctttgctggacagcgtcattgttactattgctcccacgtggttgggtgaaggtggcgtggtcgtctcccctgataggcgctttgacgaggatggaaatgcgatctccgcagcgagattgaagaatgtcaaatggtacccatttggggaagatgtcgttctttgtgggcagatcaagctctatgactgagagagaacatcttggatctttttaccttttaaaattgatcaaccctcaagtgcatgttccttcgatctgaggattccagcccagacttcgatatgttttgtctcgtggccttactgtggcaacttgtcaataaaacattacactatttcatctgctaggtcatgtttcccactccaccggcgtacagtttatcccaaactttccgttgaccccatttgtccaccacgagccaattggaaggcctgtacgtatgtatcaaaaatatgtcatgtcgtgcgttttgtccctaggcattgagggaagacttccgtatgaagaataaggaacatacttctactttactgtgggaatccacttgggaacaccggatcaaatatcttcaaatcaacactcaacgctagtcgcagcattatatattgaggactatcgtagttgcttgaactcaattcgaataatatttctgacataacagaagacattaaaaatagccttgtgtcattcatttctttctttatctgcaataatggtctttgttttcggaggatttaattctgaactaataggaaccaaaaacaattaaatagccccgatgtccacatcatcgggactccatcagggcggacctcttgatcagtgctcggagcctggaattcatcgaccatctctaggtactaaccattagatatacagacatttccgggctctacagacaatgccgccactaaacgatagtgaacagcacgagcgtatgctcactgctctccggcgaggaattcacgatctgcgctccaagccagagaatcgcatgctggtaattgaacggttgaacgcaatttctcgtctggcacgcatctgtgtacaggtcgggaaggacgctcgtttcacccggctttgtgacacccttcagagagaaatgccacgccaaatcgctttgctcaagagtgatataaatagtaatcttatagttgcaaatgcgctcgcccaaatgatccttgaatcgtccacgtttactcgctctatcgttgtttttaatagcgaggatgagaccgacgagcaaagtgagttggatcccagcgatgataactatattgcacgattgcttcttggttcgaaatgggctaaagaggtagttgaccttccggaagagccatataagatgcctgaggtgtttggaagcgctcgtgaagatgaagctgagatggatcccagccatgatgaccatattgcgcgcctgctgcttggtccgagctgggctactccgatagctgattttgctgaggagccatacaaggggaagaaggcggcgggtaagtgattgtagatttgttaggtcgcgcgaatggtcttctctataacagttcttacttgaatcgatgtttgttctagatgaagtagaggacactttgtattgtgggctggaaatatgaagaatatcatacaaatcctaaattacatagtttctagatagtatagagtggtgagatcgttttttatcattcagagcaacgcattggtgttttttaatctctgtaagccaagggaaaagatgggccggtactatctttcctgctagatgttctatcaatatccggccgagtcatctcacggtgaataatgttggtcaactcctcttgttcactgggcgacgtcactgtgtctcgtctttccaaagcagcccttcgttcatcctcgctgtccgatgttccgcttctttcggcatgacgtgacgcttgccgtctgacccgttgagcctcttccttctcaaggattgcagccgtcacccgctccttgcaagccttttcttcgatttcctgttcaatgcacgcgtaatgcgcccttctataaacaccgattgagctggacgtgatgccaagaatctcgtaaacgaagagaataggcagcgcgaaatagagttgggggttgcagccagaagaccatatgtcgatgagtacctggaagacggaatgtgctggcagggcaaagcccagtttgtagaaagcaggtgccagctcaaatgggagaagaatggaagtgacattcgagacaacccacgatatcagcgccatcggcacgtagggaggcggaagccagatggtgaaagtgtctagcacgaggaaattcacatgtgcaaaaagccataatgccagccaattgagtgcgaactggtttccattaacactccagccacttttgaatgcccagattgcaccggcggtacatatggacccgacaagtgtgtaaattgaagagatgactaggcgcgcaatagcgatgcgatgggctgacagcgaggtgtagagtttgaattgaacgtataaaccattgatagtaccaagaaagaagaactcttggattacgatcaagatgataactagggtgttgtagacaacccttgacccttgttctgtgggttgaatattgttgtcggccaatgtccaaggatcgtagaacgctgcaatcgcagcaggatcggagctgttgacactctgcagagactgtttcccgttggtttgcgagtacgccaaacgtgcagtttccgataatactttcatgctatctgcaaggacggtgtcaatcaccgttgggtagcgcgcttcattccacaccatggtgagaacattgttcttatcatacgaagatgcagctgctccacctgcgagtgcggcacttaatgcgttggacgcatttgctgtcgtgtataatgctccccagtatttgatgtcacagactgcaccttcaatcgagccgggctgggggtacgctgaggcagatcgctcaacaagggttggaaagctgggtcctttgaggctttgaaacgcagcgcgggccgcgtcgcttatcgcaccaccgtcgtagtctacaaacaaaacattaatgttatgaatgtgtgaagactgctggaaaagggatccgaataggtaacagaatagaccgaggaatagaatttggagcagaagcagattgatagcagatgcctttagcaagccgaatcgacgcggccgaacagatgggtggtggatgctaggccgctgctctcgcgctctgggatagaactgcatgtaacccggtggagcgatagctttataccagatgagggcgatgatatgaatgtcagactatagatgtaagaagtctgtgatgagcctttcgacctccgaagcaacgagtcccggtcaaaaacaggtatcaagtcccgaagcccggaggggattgtaagtgggtcggcagagtttaaaaggccgaaaggctttcggaaagatagggtgagacgaattattttgaactcatagccctacgaggtgtagagtcaacatctacctcaagattctgtgtcaagattctatgacgacatatcctgataaaggggaaacaagtcaggccacttgatcgaaggttccaaggcagaggcggaaggattctcgggccccacagtgattaacgtcgactccacttccttattatgtaatccggacttggcgaccgttttgggaaggatcccagcctgaataaccaggccgaagatcttatctctttggcccgggaaatggccttcaactgtcctctaccgatatcaatcccaatccggtccgttttttatcatcttaataacaccagcatattaaatcatgatggtcaacttccggaaatcaccggtggaacctttcttcgctgtcttgcggtgttgcaccactccttggtgatcacctctccgcgtgtatgactccggttctgtgatttttgtgaatatctcaccctaccggtaatgtcgagttacagtccggattgagagcagaatggaggtgataatggtacttccgggggaggtgaaaacccacagctgaatggcactactcggtgatgatgagcaagatatcgactcctttttgtctttagctgattggaagggtattcccaagctcgatgctccttttaaaggaatgggacaagtttatttgatgctacacgcgcaggatgcgagagcaaaatatcactaatacgctaggttattccttagttattgccacgaatcttcaaatctctctatactcaaccacaatgaacgcttcctcaacaagccagatataaatctcaacaccaatcaacattttacccaatctccgtctattggtctcacaaatgcagagtcatattgaataattaatgttgaataatcgatgttgagtaatcaatgttgaataatcaaaatattcctcggcaggccaatttctgatattcccaggcggccctcgctttagccgcctcgaatgggcttcaaatactgctttaggacgatagaaacctcggcataggttttaagaaggattattgagaagtaatctacctcggaatactcgccaattaacgattaccctatcgttgcattcgatccttcctcataagagagcgtcgtaacgatatgtacctctctgcttcttatctgtttaccttccaaggatattgtcaaaatggtgcaacttgatgacggcctggaggctgctacacacggtaccattgatgttttacagtcatcatccgacgatacgctcgacctggcattcgtcaatactgcagaaaagcctaaaagtgtaattattctctacaaggcatcctagtccgtggaactcaatcttattgtgtcccagtatccaaaataccccttttcaaaaaaatcaaccctcaaaatgttgaaggttgagtctgggctccactaagaaatccacccgaacctaatgagcttaaaatccgttgggagagtataactcaacctatcccctaatatgaataatcataaaataatgtcgtcgatataaagagcaaagtctcaatcctgatctaggtgtattatcttcacggtctatcataatacagtcctattccgattatggctgctcctaaaataaccttatatttcgacattggcagtccctttgcctggattgcgttccatgctttgaaagtcagtcgaacatctcgaaggacttaatgaatgagaaagctaatgattgtcgatagacgtcccctgtctttgcaaaatgtgacattgaatatgttcccgtctccgtgcgaggactgttccagttgtgcaagaacacgccccctttggctgtcaagagtaggtttctcttctttcttctatctctaacgctatgtactacggattctatatttatatgctaatctcccattgtagacaaggcccaatggttgaatcaagaacgcatttactgggctcgtcgcttccatgttcccatgtccgaagcgctcccagaagcatttccagcgtccacttcggaggtccagcttgctctatgccttgtggctaaacaatgccccgataagattatccccatcatggataagatctatcgtggcttctgggaagagggtgacgcgaatgtcctcactcagcccggtttctctcctatctttgaaagtgaacttgggcccgaaaacgctaagcggatcatggatgaggtgcgtttttttctggctcaaatgactcgtatttcttctctaatattgttcaacagttcaaaagtaccgagacaaaagacattttggatgaaaacacacaacaggtcgtcaactccggcggctttggtttgccttggtttgattgcatagatgcacaggggtcaaaggaaagcttctggggaattgatcatttgggacgtcttgtggattttttgcaactagatgcaaacctagacaagtctttccgcgtcttactctagcacgacgtgttgaagcttagtcctggtcactaccgacccttcacaaccctttagatagacgtcagattgacctaccagccgcatttgatttgaaataacatttcctagattatcagtctcaatatctggtagataggcggctaactcatatgtatatgaatagtaatattactacgacaagaaagacccaggaactgaaattaatttgtagaatactcgatatattgagaagttaatgataagccttcacgagtcggctccttcgtggattggggtacctcggaagaagatcctcaagggaggagcagctggctcggctttacactttacgccggcgactcgaggtggcagctccgcaaagagctcgcgtgtcgcacccgagacagattcattctttgtgatctcctgcaaatatcgtagcacgatctaccactttccatgggcaatagcagaatgcttgctcttagcagtaacgctgtcaaaccaaagcttgacctttgtggcaagattcacccaaagatctagaacaagttagcctataaaagttcaggagtaagtgacttacttcgaaggtaaaactttccggctgggtctgtcctttcaatgtccaggaactcggcaataaatcggaagcagaaagtgaaatcttccccgctaaatccattatagaagtagctgcaagggcctcctcttcggtaatctggagacagcatcgtgtctaagaattatacaaagaaagaaatataccataccagatatatatgttcttttggaggtgagagatagatgaagaaggttagattctacaatgatcgagatctagctaaatagctaggtgaagccaggcatcggcatgtgatcggtacgtggccaccacaacaattttgattctctcttattatgtggtaaattcccacctagcattctctgaggaagtaacggataatttgagatactgaatgctgaatatatttgaggtgttgatgtatgtaccctccttcctaattaggccggcacctacccgaaaacttattccgccataccgccctccacaccgtttgagattttatgccgctctagatagttacctgcaatttatatgtaagccactaacaaaatcaggtcacttttgtcatatcaactgcttcatcaagaactgcttcatcgtcaaggggttaaatcctatagggatcaagtagaatgtactaatttctctgatcaaaaaaggaatgttttttacggccagaatatatggcaaaatccatggtcgcacccaatctggaaggtcgtactccgtactgaaatttgaggcaggggggtaaatctaacaacaccttatatttactcgatactatactatcgtccaagtttatatgcgaactatgtgttcagtagagggggtaaagtcattattttactcacttggtgacgcgatcccgcattgaatggcaacatgtcgttcaatcaaggaccggccctagctaagtcctatttggtctgaaccatgttacgcagtcttgtcggtcttcctaagcgatctatttgcattagcactatctttcgtgaacccctccatctaaccggatttgcccttgccatgctgatcctgcacatactaagcatttgattcatcatcacaggcgcaaatgtcaccttataaacatacaattccttcggattttccccgcggcactactgcacaatgccagatagcgtcggattgacattcgctacgagcattgcgcaatcttaggtgtagggcacgagtgacaatatatatcttgtaaggaaagactcaaatccatattgtggaagttgtcaaccagactcaaaattgataatgtcaagcaaaagcttatcatcgcttgattcaaagcagccgatagtccaacagacgccggttccgaccacaaagaatgctgtaaaaagtggagttttggctgcgggtggttcagtcgagttctatgaacccatcgcggagtacgaaggaaaacatcgatatgatccacttgccgaatggacggagaaggaagagcagctgctcgttagaagggtaatgaagacctttcctaggattcctatactatggaccaccgactaacatttgacatgacagctcgactacagaatctgttcttgggtctgtctgatgttcttcgcacttcagctggatcgtggtaatatcggacaagcattatccgacggaatgcttgatgacctcgggctatcaactaaccagtacaactacggcatgaccatattctatctttgcttcctgtgcgcagaggtgccgtctcaaatgatctccaaaaagcttggccccgacgtatggattcccattcagatggttctttggagtgtagtggggatttgccagggcctagtcagcggcgagcacagcttctatgctactcgagcacttctcggtctgatagaaggtggctttattcctgacgcacttctttacctatcctacttctatacaaataatgagctacccatgcgaatcgccttcttttactgttgttccagcggtactgctatcgtcgcggcgtttttggcatttggaattctgcacatgcgatccatcggcggctgggaaggctggaggtggctgtttgtgctcgagggtgctgttaccttcactattggtgtcatctcctggttttatctacctccaagtccgacgcaaacagcaagctggtttcgagggaaagatggttggttctcagagagggaggaagttatcatggtcaatcgagtcctacgagatgatccggcaaaggtacgtataaagggatttcttttcgaagttcatccatacacatactgactgtgattataacagggtggcatgcataatcgtcaaggtctgacactgaaacttttgcgggacgctctcatggactacgatctttggccaatgtatttgatcagtctcacgctgctggttcctattaatcctgaatcagcatatgtgaccctatttttaaggtcacttggctttgatacattcaaggtcaatctcctgaccattcctgcgaccgtgttattcctgatccaactcatcttttggtcttgggtgtctgaaaagatcaacaaccgcatggtcattttactattttattccttttgggttttccctcttctgatggcactagagctgatgccggtgactgcaagtccttggagttggtacgcagttacagttctggtcattggttctccatatgtccattctatcaatggttagtactaatatcttctcacaacatctcaaattccgaatcctctgaccccgttcttcttatagtcagcttgatctcgcggaacgccggttctgtgcgcactcgcactgtgggtagtgcagtatataacatgctttgtcaaacaggctctatcatttcttcaaacgtatgttttgtgataccccgggatatccttttatatcgttggttggttttatgcctaacatatcttctttttcagatctaccgaacggatgataaaccctactaccgaaagggaaacaagatccttctggctcttgtcggatggaacgttttggtcaccatcttcattaagctctactatatgcggaggaacaaaaaacgtgagcagctttggaatgctatgagtccagatcagaaacagcattacttgagaacaacgaaagatgagggcaacaaaaagttggacttccgatttgcccactagctcctagtgagggcggatgatggtgggtgcatgttacaaatttgcatttgcacttgacggtttcaaaaatattcgagatgaatatacaattatcttttttacacataatgttaaattcaggcgttatggagcgctttatacggattcagcggtcttatccgctaccttgatgagaatgattgcagtgaatatagaacctgaacaacaaatggagtttttccaaggcacaagagcatatgaatactttctacccttgattcaaaattccccatgattttccatgattctgatgttgaggtttggactacaataacgaacagtgcaaacatgctaattatgtgcataattgtgctgattaaatctatgacgccaagaccgagatttatgcacaaactgtaggcttccttcgacccaacttggtaagagcacaccgatccatcctctcccctattctttcttgtcggtttattatctcccccgacacactgtcatgcactggcgcaaggctctagagagaatgacatatctccctatctagtcataccgtgctcgctttgacatctccgtgaaaacccggtctcagtgttgtcaccgttattatccctgtcaactccaacgccgatcataggaagtagtcggcgcaaggcccccgtgacatcatatcctaagtggaaagtcctcaccgactggttaggccttcactgtcatctcagccgccataatgcggggtaatcgacaatggaacaagctcgatgttggacttttctaatgaggaaggttattcttcgatccgatatcgatggggcagtcttgaagtagtaaaagatcggtcgatcggacgatcggacgtcctttgcgaaggacttcacgtcgctaatgttatagttgcttctatgttcttttgttaagtcctgcatgctaaagtactgttctctatactattatctgctctaagttctggtgtctgaagactagaagctgagatcatacagatggactgtagtgtacgactagcgccatgtgtctggcccctgatgaccacgagtgccaacacatgaaagccatgcgcctcgtgtgacccaacttcaccctgggccctatttcccgggcctatcatcgtggagaaacagacattggctaggggtaaattgttggagatatcatatctgggctgcatatttccggattatttcttggcttcgggtcgctttctgtttccacaatctatcgaattttctctcccttgcatcatgttactactgtcggagctttgacccttgatcgacgattatatacccctagtccgaagttccttgccgcatctggccgagcttggcggtttgatccgcacattctattccctagtcacccctagccacccgccccgtgggagatcttccggcctaatctatacgttgtatcatggctctaaagcacagctgaacttagactggcttcaatggtagaattagaaattgtatgcggtcatactgacaaatttaatcatctcaagtccagcaacgtggagtcaagtcgcagggcattcacccagtcatcttgcagttatctagggatacccggtccttctcagaatcagaattctagactcgaatcaaataatggccctcggccgaataaacccaatctcatttgtgccctcgccaaccaacatcctctatggcaagggatttgaggatatctccaaggttcttgttgaagtatcaaggtgctttatcttcccttcttttgttacccttccctttcaaagtcccctagtgatctagcgagtccttcatttgcaacccgtcaaacgcaccttttagctttcaagtattccataacgtagcccaataatagggttccaaaaatataaaatataaaaaaacgccagcacaacctcgcacataattggatggaccaaactacatttctccgagtcccgatgccacctgatggatctccatatcaggcgttgcggctgtggctttcattgtttaatctccttcccactgctcggagttaatatgcccctcggggccaagcagacgcccagcatgtggccttacttcaggtgtcttggtaccctaaatccaatgccgactctgttcccctacattcggacaatgtcggtcaaatatacatataaggacttagctcccctcctccgattgatgatcagcaacttggatcttcgagacctctatcttctgataattcgtccaatatgcggtctttcatgaaatccacttccacatggggtctactaaccctatcccttcttccggctgtcctgagctcgcctctattcgaaaagcgaatcaagggcccctggctgggcctgaacaccaacttcccggatcccagcttcatgaaggcggccgacaacaaatggtatgcattcggcaccaacggtaacggcaagcgggtccaagttgccgtttcaaatgacttccaaacatggacactcctcgatgtcgaagccctccccacaatatcaacatgggaaactgagagcgatcactgggcacctgacgtagtgatgcgagtaagttttctcggcttctaaaaagattaaccctaaaaattaactatctccaaggacgacggaaagtacgttatgtattactccggtgaagcaaaatcagatctcagacaccactgcgtcggcacagccgtagcagaccacccagaaggaccctacgtcccaagcaacacgcccctatcctgccgcctggatcagggtggctcaatcgacccagcagggttcaaagacaaagacggcagtcgctacgtcgttttcaaagtcgacggcaacagcatcggccacggcggaaactgcaacaacggcgtcgaaccgcttgtttccacgccgatcctgctgcagaaggttggcgccgacggtgtcacgcctatcggggacgcggtgcagatcctcgatcgcagtactgctgatggtgatggcccgctggtcgaggcaccgaatctgattctccatgggaatacgtactttttgttttattccactcattgctttaccgacccggcgtatgatgtgcgctatgctacggcgcagagcattacgggtccttatactaagaccaatgttccgatgattaatgctgcgaatacggggcttatttcgcctggtggggggaatgtttgtgggtgcggggatcggatgttgttccatgggttctgtactgaggagaagacgagtaggtgtatgtatgtcgctgatgtgactattgatgggaagacggcgtcgattgcttgagagattttgtttgcattttgcagttggtccggtttcatctggactgtggctttggttgatatataccccgggttttgagggcttgcatgtgatatgtggtgacagcaatgatatactgtttcgcgatttcaaacttgaatacttttcgcatataagtagagaacaactgctcttcgccacaaggaactgtagaatcacaattatgaaaagcacgtacacaaatgtagtagaattaaattatttttttatatcgtcgtatcgtcctaggcccgcctgcatgcaccccagatttattcgtccttttcctctccctcagcttcttacttttcatcttcctttgcctcgtcctctagctgtacttcactgacacgcctcttatcccgtacctcttgcacccactccgctgcaccctgaatcgctacctcgggtgtctccttgtggttgagaagatatccttggatctccgcagcggtaagctcaccactcggaacaacagcagcaaactcagacgccaagtcagtgatacgagatcgaggatctttttctttggccgttttcactcccccattactcttgtcggagttttggataatctcgctctctaccttggcgatgttaccaacaataggagttgatggcaacttgactagcccattgataccattgatgtgggttcttggcgctgcgatatgggcaatgtcgttattcatagccccgtaaatcgagataaaaagctccttgatatctgcttcgcttgtgtacccgaagctgatcttcatgtccacacgcccgggacggagaagagccgggtccagcctgtcgatgtggtttgtagtcataatgaggatacggccttcactggcggcaacaccatcaatcacgttcagaagtccggagagcgtgattccgcccttcttcttcgtgtcgtctttggcagctgtgccatccgcttccacgccagattccttgataacaagatccacggggttatccgaagtagatgtaggcgcagattttgcggcccgagcctttgtaatgcctgctgagtcgatatcttcaagtaggataatgcatcggcgtggtagttccgagaacaataacgacagactctcctcttccaaggccgtggaattcagatccaacaggtagagcttcaatccaagcagtccggccgctgcaaagcacagactcgtcttgccagtccctgggggaccgtgtaaaaggtatccacgccgatatgggattccacggttgttgtaccagcggcgcgtgcgagggtgcaggtattctttgatatcatcaaggaagtcatgcttctgttcttgatcgagaataacggtagaaagaggacgcgctaaccgggccatacaccgatgccagctgaaggcttggccggcggaaatccgcgagccgcggtagattaccgtgcggttcctgtcgcgctcaacataggcctgttgtgcctccgctagcagcgacttcaagatcgcaggattccgaccgagacacgatatgaatatccgctcgttgttcattacataccacaaacccccgtctcggtgttcgcgctcgagcatgagcggtcggttcttgtaccagaagtagtggcagccttccgcgggagtaaattgcatcttcttgtacttgtcccgggtggtgaccctggcccagtatgaatcgaaagaatcgttcttctcgccatcgacagtctcaccctcggcttcttcttctctgtcgagctcctcttcatctgttatactctcgctccagtaactattggttttgatgcctgcgacgaatcgatttgtatttctcatatgcggctgacgtgagatccagaacatcagataatggaatgcctcatcgtcgaggcgaatttcggctcttgacacaaacagctcattgaagttcgcccaaatggcgaatacaaagtatcgagcagttgcgccaaagacagcaaggctgaccaggagttgcaggtaagagctgacatcaaaattaaggtaagataccaacatgcgcgatataaagccatagccggggactagaacctccaacatggccgagtccgtcttggacaaaggccccgttgtggggatagtttggctggaattcatgatcgatagatctgaaatgctcgagtttatttcgcttggatttgctggtaatagagtaggaggaaagacaagataggaccctgcatagcaaaatcaaagcataggccagtcttttatggcccggggaacatatttgagcctcgtgtgttggcctttcccgctcagacacacatatgccctcggccgagcctgagatgtgcctgacacgcctcaattcgcgaacatgcccatgcagcattggtcggagttgattggattggacaggatgggattcagttgggctggttgtgggcgtctgcctggactttgactcattcttgctgcacgtcgctgcggtacaatttcctacgtcatatcgcataattagaccgaagggtaacatttatttatacgccacgttcgtatcgagttaattttgagaagataaaagtgaaaagcgggagcaaaagaaaatgatttttgccggcaagtgttgtgttagaagtaaacggcagacattgttatgctttaaataaacattggacccttggcctagtctaggctccagtggcaaaacacaaatcacattgcccgagcctcgccgttagtgtctcactttatctcgcatcgcgcacttctgcctgaagaaacgttggggctttttgtttttcttgctgaaaatatggccatcataagtcagcctaaatgcgtcagttctatgcgtaatagaagctcccatccattgttcaatgtaagcttaatgaaacaagtctaaaccgaaaaaaaaaaaaagaaatctctccctcggggaatcgaaccccggtctcccgcgcttatcggttttaatgacaagcggaaatcatcaccactagaccaaggaagaatgcgatggccgagttactgctcggccacttggctggttgatggaaacagtaccccaccggggccccatacgggagtttagaataacctcaatactaaaacatccaatcttctacttgatatcactctattctcgtaacaagttaaaacatatttacatagtcccaagggagggagatatgtttgccacatatttgataaaattatctgaacataacggattagtagcacgatgaataatgggactttgattgcctaggttgaagtttaggcacagtcagtataaatctatcacagagtatactacttccttcacttcatcctccacctctatctactattacttcctgaaccactgatctggcccaatagtcgcttaactactccatctctatctccatctatatcttccctttgttcatagccgaacccctgtaagccgtttatccccagatcatcaataaaaccagctggaatctaaagaatcctaacaatggaaacagactgcccagaatgtccttgggccaggatgcccctcagctgactcctatttcaaaggctccaaagcgcagcttccaagaaatgttcgacgaaagttgctgcatagttgacataaatgattgtggaactgatggaattgacttcaccgagaagctccctgataccaccaccttcctgtctacacctcagccaacggacaaactagtggaaacccacaagaaactgaaaagactggctgagcttatcggagaaggcaagagccttgccatccacactaactacgcaaaggctcccaaaaaagagcgagaccccatcgacgaggcaaagaaaagaatgcggtcaatcgagattaagcagtacaatgcctgggtcgctggtgccgtcatgcccactgtcgattggaaaaatagtaacaaaacagttgaacttcccaaagctgaaaagtctcacttcaagcatcaagttcatgccattcgagagatctaccctaattcgcacatcactcgcaagaacgcacactggttcatagctaactttcgctatgtgatgcctcttattgaggcagtcgcgatggtacggcgtgtgcggtgggagtatgtctgcgaccaagaaggccccagccggatagatctggcagatcaagaactcaccgaaatggagctggcggaattggaaacagctcgcagtatcatccggatcaccattaatacccttcagaaaagacaacgccggttgcaattggatgctactctgagggagaaacatttaagcttagaaacggtgatggaactcactggtgcagattgtgaggttattcagaaacgtgtcgacaggatccatgagagcgctgtgcgagacaaggggacgaagtgttccaagactaaggaatagccggatgtcagtgtacgtctagggattgggtctgttgctcatgtgtcctctcgctggctttctgtccacctgctctatgtctctgtgattatctgttgatgaaaaaaccccaagaatgaaatgttttaatgctagtctactactccagttccaaataatcaaaacgtcgtcgcttctactctcgctcaattccttaaagagctgcggcctggtcctgatgttattctagtctcgcgatcttgttatctttaaaagaggatccgacacaaaccgcatacctctaatggcctacagttttacactgaaggaaagtaaagattatgagtcttcaattctgctcgcaactacactgcccaggactttgaagctcattctgtgttgtcctttgtgaagagccatccattctgggcatcatatgatcgagttcaaagcacaaaattgaagccgataggaaattgtgaagcagagagtgagggcacagaataaaggaacgacgtgtgttggtgtaaaacatgaggagagggtcggggacgtagaggaaggttgaatgggagaagcacaggacatgatcgtcttgtgaagagagacttcagacaagacaattcaacctctcgcacttctaaacccctcagtattcttcttgcgattggatggaatccccgcggtcctggatgacctcacaggccatgcgaattttggccgccagtcggtccactcgccgttgttcctcgctcacgcgctgttgttcatcggcgagggttttcatagcaacagtgacaatactgcgtgttgtattcagttccacaagctccatttcggcttcagtgcggttgatttgatcgtccacatacttctgctgcgaagcctgcaccttcataactgcattgatgagaggcatcgcccatggaaagttggcgatgaactgagatgtggcgtgtgggctgatctgcaggttgcggcaaatttctctggcagcatgcaggaactgaacagcgcgattactgtcttctaggccatatggaatcataggaggcccctgggctttggcccactcgacagtggggacgatatcaccacgaatgtaggcttcgtactgttcgatctcgagggcggtcatcgttgccttggcatcggtgatagcatcacgctgaggcgttgcattctttgtgtgaatagcaaggcttttgcctcttctaacaatggaagctagtctttccactttgtcgcatgtttccaccagtgaatccgctggcttgggtgtagacagaaaactggccgtggcagggagagtctcggtgtagtcaatgccgcgattgcttcgattgtttttgtcgagcatttcttcgaacctgcgcttccgagccatggtactcggtatgatctgtgtgggcccgatctaacgactctctgatcaatttggcttttatcgtcagcattgcgaatgattgttgatgaattgagaacccgtgacccttatcgcagcttactcacaggggctgggtcccatggaacaaaatcctagaagttagctattaatatggagcgaagattgatatggagataaagatgaggttgagtacataccgatcggtgggaggagtggcgtgtgatggaagaaaggaaagagatgaagaatgaagtgaaggttgataactgccaccacgaatgtttgcattggctctgcaaaagatcgtgttatttgttgtaactaagttctcaatagcctaccgcccaatctctctgagccccagactgtgaggaatccttgtcgggcttggataaagtaagcttataattcaaaaagatactaccaccataacaaatgtgaggtttgtgtatcatatggaagattagaccgctagctaggaatggaactacttggtacaaatatatgttggtcgagatcatttgtatttttgaagagcggtttgagtgctttctttcgccattctttttgaacgacttcacaacatccttgatctcttccgggcgttgaagtatcatacgcacggtctcctcaacaggctgaacaacggggtttcaatagttctcaagacgtcaccaatcactatggagagggtctcacatcgggatcaactcctagtcagaaattgccaaactaggtatgcacttctgagctgagaaggaacccattctcggtagagtagaggcgagaatctccaatctcgctaatgggtcgagtattggtcatgtactagaccagttgccaccgtatctccgttcctatagcatgctgacggggaatatatgctttagcctcaaggccaaggaaagactcgcacgacccggcaattgcatggcaaccatctcttcgagagcatgcaacgcctcgtgaatgctatgagacaagtagacgatatagcttccccgcaagagcagtttataggtgctggatatatggatcgaggtagtccgcggccggggggaatctcaccgggcaatcctctcagagcttgtgaatcgctcttcggagtatagttatgtacccgcagtggtccaaggccccatgccaaataggcattgctgtaatgaacgagatggattcccgtttgagaatagaaaggaactggtactgacgcaggcagatggtcttgagacggtgccctcatcgcggataaaccaacgaaaggcctctagcgccaagcctttcgcctgcaaagtatcgatattcgccaaagatcacgaggtaccaaggctcgagccaccattctagctgtaacaaccaggaggggaaaacaccggacaagacatgtaaaaatatatatgcgaagacgaagttctaatatcgaaagacgaatttaagctatatatagtccccgacattgataattgtataaataagagtccaaccacagttatatccacaattgagtgcacgatgcactatattaagttgtaccagggccagataggaggaaaaatctggcagagttgatgtatgtaggtaagctcatgcactatgtgtctaacgaaacaagaagtgatcaacagaggtgagttagattgataagaataatctgagacttgtcagctctctaaatagcttgatggagacaacgagagaaaggcccgaaagccatcaatgagacaaggagaggcctgggaagctgtatgaaagtaggaaaagccttagtgcgtacgcctgattgcattaagagtctacgtagaagcatataacaacaaagccaatcacttttatagcaaacaaaatttcgcaaaattatccgcctatcatggcgacgcctgtgtggaacaaatcatgaacctgactctcctctaaggaccgttgagattatttctgctgaggttgtaaggacctactccctgccttgtttgatcttccttcttctctttctcttatatactgagagaatgagtataatttaaacattatatacgtgaacatgggtatctatcaaaatgtaaagctaaacgcacataattgaacaatcaactgtcagattccgggtgtttgccttgaacagcatcggcaacgccaccagcccagttcttaaaatcatcgagtttgtgccagactgtgccccaccacgtcgaacccttctcatcgtcactttggtagtctgtggcgggtggtgcattggctgctgtagtgggtctcggtgctggccgtggtggcttgcgttgtggaggtgatggctgcggatatgcaggttgcgaaggccctgctgttggtgaagtttgagccgggggatcaggtggtgtgtccaaaaccggtgcgttctcatccgagtgaaggccgactggcttcagcgggagtcgtagtgtgccattgcctggaaggggattgacacccaaagagtcacagacaatgttatatacctcgatgttttctatacagattcgttaggtcaaattccaatcgatggttcggagcaggtacttacgaaaaacatccaatcggctgtttggcttatgagggaaggctgggccgcgcgcaataaatattgcacgcatcaatggatgctcgtggtcgtacccgtgaatacctcgaggatggtattccttcccagtcttcaaagcctccttgacatcgaactctgaccgatcaacgagagcccatcccgccttagggatgacccacaatggcgcaatgcgttcgttgtttgagaagtgataccgttcaggcattgtctcccgtgtgtaaaattcaaaagcatgctcgtaatccggagccaccttctccaattgtttgcgaagggtctccagatcctcaggattcttggcgcgcagaccaccagatggccacccgtcaatatgttcaatcagatcataatcaatcaaatcgtccaactgaaccagcctttccgtagaggtagtagccatgccgtggtctgagacaaccatgatgtttaccacgtcggtgagattgcgttgctcaagaccagtcataatgctcgcaaccatgctatccgctgctgaaatggtctttcggatttcagtgctattagggccaaatttatgcccatctcggtcaacgtcaggaacgtaagctacgatcaactgcggccgctcaggtgttatctgcgattcgtcctcaacacccggtagatccaaaaacccaaggacccgatccgccttgcgcgacaagagttccgtcccgttatatttgtccaaaaagctcggctccctgtcaccaatgtgcgcctcagaccccggccacatatggatcgcggtcttcacgcgctgcttttctgcggtcacccagagcggttccgccatccaccacttgggttgcatgctgacagtgggatgggtatagtagaagtcttcctttatcttcgggtcccaaaatgtgtttcctacaatgccatgactctcgggatatagtccagtcataagcgtgaagtgatttgggaaggtgacgctcgggaagctcgggttcatatattgcggggaaacgccattggcgatgagtgagttcagcgcaggagtcaggccacggtcgagaaagtcggcccggaaaccgtcgagcgagataatgatagtggttggcgcaaagagagctgtgccgttggagagcaagcgtggagggtgtgctcgtgaagcccggaacccactagaggctttatacgcgccgaggaagaggatgacgaagagtatagcgatgagagtagttataaacagtattcttcgccatgaaggccgtggaggctaaggagcgaatgtgttagcaagaacatagaaaccagccatggtacgtcttacaggttcatatctgtattcgcctgtcctgtccaaatctaacgatgatgcactcaaaacagaggcattctcgtcaccaattccctcttccatctcatacatcagctcgccgtcttcactgactctctcccgccgtgaccccctccgccgtcgccgctcctttttcgtcttcccgatcttcacagtgctaccatttgggctgaatatcctccgcagaccatgtccagtgccacgccggatcagaagattctctagctcctcttcatcttctagcactgcccggtcgtgctctgcaatttccaaggtgctgcggtgctgatcgaggagcgcgtcatcgtcggaatctgagtcctgctcggagggtgaccgcaacgaagatgcatcgttgtcgtaattggcaggagaaagaagggaagaagtagggtctgggcggcgcattgctagcctggtgaagacatggaaaaagagttgagaggagaaagggagattattgccaagacccggcaatcagttgcgataagcccgatctatggcgttgtttattttggttattttgacaattacatgactagaataagatagttttaactaaaaaattgaggacgactaagcttgctacgtcaggttagattaataatcctttgttgttcacgggttgtgtacctgcttattacggctcataatccgatcaaggtagtcgagatacccaagcagcagtcggggaaactgctgggcgattgtgaaagcccatttcaaatgtgagatatgtccatagtgcttagaggagccctacttcatatagttccagcaaaccaatgcttgaggagatattccgattcggatacggaattactaaatcccggatatcaattccttgaaagattccacctcgcaaactgcaaatgatgagacaagagccaatattaccacgaagctccaacatcgcaacaaagttgggtcatacggagtactctgtcttgtacaatcaccagatccccatctctacgcctccgatgtgactgcctgcagtgatttttgtagaaagtaaagctcgtaagtgactagcatactggggctattctctatacttgaagcccaaagctgtcaaaccccattaatcactatatgtctacctagctataactatattgtattgaattgatatcgattactatggactctgttgacgatatcccctgattgatttgccattgatttacgagatactggaaacacctcccccctccatagacaccgtacccctatcagatccaatcaatacggtcgccaagcctcagctcatctgcatgttgcaatgtccctgggagggttgtgcgcaagattgccctcgtctaattgacgggcacccaacatactcggttaagaggggatcttgagagcggacctttttttagggatcagtcggaggccttcttcttatacctaatctacaccattctttcattttgcacaaacttctttacttccgaccgattagttaaacgaaagtcatggagtcaatgaattggcagaccgacatcaagcatggtgattcgttgcctccgatcaactggacagctctcttcgattatgctctcaaacttaagaggcaaccagcgcatggaagttttatccactcgatcttgccatattcccccatcataccacatgggcggagttcacctggtgagagtcctcgaatttgaggacggcatgaagtgggttgcacgcatcccattaggccagtgcaccagcgacaccaagaaacgcttgcttcatgaagtccacatactttctttgcttcgtgagcgaacggagatccctgtcccgaaagtgttcggttatgagacaaatgggaatataatcggccgtgccttcatgatcatggaattgatacctggcagtactgcgatggatgcttttggaggctgggaagtgcacaatggtgaaataccagctagattcaaatcagcgttctgccgcagtattgcagaaatacaggtaagcgtctggaatactcgcctacggtgagacgtcgactgactaacaggttgccatgtctgaaattcgatttcctaagattggtatgattatgagacatgccggtggttcatacgatgtcgactcaatacctggtataggaggccccttcgaaaccgcagctgaatattttgccgcatggagcaacaccgtcaagtttccaatgcgagacatcgatatcagatcccgtttgccaagtcattggcatgatgaagtgcctgcatcaatcggaggttttcctgataaaatcaaagaagccctacatatattatccgtcaaaaacgaaggccctttccccctctttcacccagactttcgacatagtaatgttatcatcgacggtgattataacattctgtcggttattgattgggaacatgcgggcacggtcccgtggggggtcgtcgattttccactgttcttgggtgttgtacctcccccaatggatttaccaacaaattatgatgctgagggaaaccccgttgacgaagagacacggaagttacggagggaaaggaacgattatgtgcaaagtgttagagatttcgaggagagaggctctgacaacagcctttctactattttggcctcgccatatattcagaatattgcgactgccctggggctatacgagaatgggaaacttgggctttactgtaaactgttcgatgagctctagttagctatcaccctttttgtagacaccgcacccctgtcaaacccaatcaatacgctaaagttgtctctgggctatgcaagtttctgtcaggctgtacgcctaataaagatccctaaaagagaaatatatatcagcttgcatatgtcatctgaggaatatccatgtcagttactccgtacattgtcgatctgtgaggggctcgtcacatgacatgtatattgacataaggattatgtaagatactgttgggacagcggttttagtacatactacgggacagtctaacctaattaggagaggtcgctcttagcactccattttcaattatttagagatcacctgatctgtcaaacatgaagctattcagagatcacctggctaatttatctggtctgtcaataacatgaagctattcaattaatctgctcaattggtctcattaattggtttgctcaatagacattattatgaagctattaagagatcgcctaattaatcatctcatccgtcaagatcactaaatcagttcaactgctaccgatgatatagctaatttagttccgaaaccggcatttgcaaaaatggatagtttaggttgcaagttatccatggattttacctacttttatgttaccaataaccgggatcaactttgttgcttgaagcgtgaggctgaaatacatagccctaaaaaaacacacattccactgctactgcggggaatcacattcctcaaattgatcgcaaatgacaaagatcggacatgacgaacttgacgtgaaagctgcttagttgaccgaagacagagaagcatgaaaatgtaaatgaccgatacttaagcatctcgaagtcaaattcctgatgttaggtgagctgcgttgatgtagactcactagatgccggacagccggatgcagttgttaggagactggctgggcgatcagctctgcgcaggtcacagccttgctaactttgatgttccgagaactgccaaagtcctataatgccatgatagaagtaacacggcagttaatccccaaatacggttgttacgaccagttctataggctatgtgtgctctaccagacataaagtacgtaccacctgccttacagctagagaagtagtgatccttgtgatatcactacgcagagagtcatgggtagatgaccgctactttatgggctcatcttcctagggggataagatgctcttcaccccattgtcttccaagactccacttcttcagacaatgtcttcagtgtatggtcccgaaaacaggtgacccataaatagaatcaacttgtctcttattgtctcatctctgaagtggatcactgtggaattccacgttggagtgttcgacgtgtgatgtccgcttgcgagcggctacttcccaattgggataccatatcacgtgacccacctaagccagcgagatccccacatttcggacgaacagcaacgggggaagatcatgacggagttggtgtcggcctcgtccgattgtatcagatcaaagtggattgagtctatctagaacagtgcgattatccccggatgcggaattcgccttgatctcgttttcgatgccaagacaagaggaacataaccttggaatttttttcctccaattactgatgccatcactaattaaccttaattacttagatgccggattgggaaccgttgcaagatctataaagatgccgtcctcttcacggattctgctatgtccatctcaatcgcatctcaccttaagtaagtactcgagcaccatgatctcaagaatatgtactaatgcccgtcctagctatatcgcttgttaaagaacaggccttatctcattccttgatccaaatcgtgtttgttttccaataaaaatgcacttcacagccccctccgtcgccttgctggctctcgcagccggtgttcaagccggctccaaacagctgcaggaacctcccgtccacgtgaagggtatcatcggcaagcaacgtgttgagcctggtactgatgttgctcctaccggtgctcagaccggtactcatcccattggaaccggcattgtcggcaccggtaccagcactggtagccaccccatcgtgactggcaccccaggcggtcccggcggcggtgttggtaataacagcactatcattgtcactggtacatccccctgctacacctgccacggtagcgcgaccatcccagtctatgttcctaccagaactcagggcacctccccatccggtggtgctggttctggcactggctcaggctctggcactggctcaggctctggaactggctcaggctctggatctggctccggttctagctctggccctggctctggttctggatctggatctggctccggctctggatctggctccggttctagctctggccctggctctggttctggatctggctctggctccggctctggatctggccctggctctggttctggatctggatctggctcaggctctggatctggctccggttctagctctggccctggctctggttctggatctggatctggctcaggctctggatctggctccggttctagctctggccctggctctggttctggatctggatctggctcaggctctggatctggctccggttctagctctggccctggctctggttctggatctggatctggctccggctctggatctggctccggttctagctctggccctggctctggttctggatctggctctggctccggctctggctccggctcaggctctggctccggctccggctctggtatcgaaggctctggctctggctccggctcaggctctggctccgactccgggtctggtatcgaaggctctggctctggctctggctctggctctgtcggttctggtggcgtcaacggctctggctccacctctggcgccggcaaaggtgccagtccctccagccctgtctctacctctggctccgacagcacgaacgattacagcctctccagccctggctccaaggttaccgctccccagatcggagtcattagcgctgttattggcagcatggtctacggtaccattatgctgcttgcataaacgtcttaatgttcaaatggctgtctcttaatgttggtgattggttattctaattactgggtgtatttttgtctttttcgatatctgtctgggaactgccttctggttagagatatgattagattagaaggcgggaggagtactggggtgtctagggaggcgttggaggatatgatttttggtttttggtttttttgtgtttagcaatgagttatttggtaatataccagaacctaatatgattataattctaattcaaaagaatgtttacggttattacttctcgaacttgtctgtctacgtgaacgtataaagatgaactcgaatatattccatcaacacaaacataatgtatttcatcaccagagcataaaaaactaaggctcctgtctaaggcctagggccatatcccagcctgacaccaaaagccaagcctacagctcaaagtataatcccaagtggcaaaagaacagccctggtcatacatctcgtacatctgataaaagcccagaacgcagtttagtcgtccctgcagggtcgaatggcacgattctcggccgtatggctttgttttagggtttacgtttactttaaaggttcgcgtgtaaatatccacagatggacggagattggcttgatcaaggtttcagattggcttttatgtaactgctttgtgtgtgtgtgatccatggtttgaacaaccctgtaccctgtaaggctactttcgagattacgagataacaatagattgtgcggtgattgtaccgtagatttgccgggtcaaagagattataaatttagaccatgattcatgattttgaatttgaaaattgcattatgacttatgattttgaattttaaactggccagacacacctatatataaacacttttacaagtcgagtctcatctttcgcaagaaatgaacagaaagccacccaagcaccatcagaatcagtgcaacgtacaccaacaaggataaagaaaagtaaggcctccaaatcgaacggtcgccgtctcgtctctacacactcgaaatccaattcacccactgacacccacaccccccatcaccaccatcaacaccgccgtacacctcagtcgtagcattcttcgtctcatcaagacccttgaatagtcccgcagccggattaacaaggttgccgccgatagagcggtcctcgagctgcagctgcacggcagtgatattgtaatgcccgtcgttttctagcgggtagcagtataccattttctttttctcggctccgccgtgccggtccacggttatggttaccgggtatggaaatgagcctggccgggagaagtctgttgcggaggaagaagatgtaggggtgttagtggatgttgatgtcggtgctgcggaggaggtggcagtgctatttgctgtgctgttggattgtgggaggagttggcggccgattttatctggttgcgtccagacttggacgaggaaccgcgtttgggaccatgtgcatcggtagcgtgcgtcggcttttgtgctcccgccgtttgtgtccgcggctgaggatttcgtttgagaggttaggaatatggatttgtcgaagtagctgtaaaagccgtagtgctcggttgcgagaccgcggttgtagaggcggattggctgggatgaagggagtgggtacagcattgctgcggatggggttccgtctgcgttttcttccggtgccgggattatcgatgagatgttcgggtatgcggtgccgttggtgctgtctgagcggcggaatatgcttgccgaggagagggagactggtgagaggagggacatgtagaagggggtttcttcgccggcgtagggtgcggcattgttgtctgtgtattggccgaggaagctctgctctgcatcgcttggggctgccggggatgaattgaagaggttatcactcctaacacgtatattcgagctaaccgtggtactgttatcgtatgtgccattgcggaagcggatggaaacacggaaatttggctggttcgcattatacggctcattggcattctgctggcctttgggcaaagcacaactccacatcgaggagggagtgatgcaggtcgatctttcaagctgtggctgcgtcccagcgagtgttgcaatgccagtcggcatgggcggatagcctgttaggttcagccactgtgattgaacgggagtatcggctcctttccttgttagggtgatcgatagaacagtagctaagatcacgataatgaagaagaaaacgcagatcaggaaataccatctccgtcgagtacgaccctcgcgccctggacgtcccgttttcttgctgaatggaccccggccacgccagaaaccacagacccttcggccggtggcttcttccttttccagtctgcggcgtcgagtctcatggggtcctatggcgccgcttgggttgacgctcgtaattccagctgcaggatcttgattgtagcttggctgcgtatcatagcgatggggtagagcagcttctcgaggatattgcgtgtatgcaggagccggtgcctccatatccgacattggtatcgagccaggtccgcccgcggcgcgctggaaaccgggagagataggctcagaagcatgtaaaggtcgttgaggggcgagttcagatccttcagataatcctcgttctgcttgcggctcgtcagacacatgctggcgatcctgagccgaggacgcctggcgtcgaacagtaggctgggtttgtggtacaggcggtacaggcggtgcattcgagtgagggtgtgcgcttgcactaaatggccacccagacccagattgccgtccttggataacaagtggccctcgaggctggtttgcataaccataagttgcctgtcgtgtctggggaggagtttgtccatttgaaacctgagatccccgagaagttccttgtgtaacagaaggttctcgtggctgtccttgtccatatgcccattcaaaatcagaagcttgttgatgggtagatggcggttgaacctgcggttgctcttgcggtcctcgttgtccccatggccattctgacctcggtgttgcgacttgagggggtggctggaccatcgggtcctcgattcctcgcgacatttcctgcggctgcggctgtggctgttgcaatatcggctccattggtgcagcctgcggtgcgaagatcggcacatattgcactgctggttgcacaggctgtatctgaggctgcggtgcaggcgaagtataatgaatattagtaacagggggtgagatgttagtgattatctgcggagaaggagcgggagttggctcaggcataggaagaggggcaggagggggagcggaagctggctcaggaacaggagccggcgcagaagcctgcgcagggccaggtgcaagagctggctcaggcataggaataggaatcggagcgggagccggcgccgggggcggggccggaccccgccccctgnnnnnnnnnnnnnnnnnnnnnnnnnnnnnnnnnnnnnnnnnnnnnnnnnnnnnnnnnnnnnnnnnnnnnnnnnnnnnnnnnnnnnnnnnnnnnnnnnnnnnnnnnnnnnnnnnnnnnnnnataggaataggaagcggagggggagccggcgcaggtgcaggtgcaggcgccggctcctggacctgtctgtcagtcacctctacaggcgctgcaacaggatccgcaacaggcacaggaacaggatcaggatgcgaagcaccacactgacaccgagacccagaaacaccatccctagcactatttgccgccacagaccccttctcatccccatcctcatcaacaacagacgaatcccacgaattcgaactgaactccgacgccggcgacaacacctgcacctccttcgcgcgaaccgcgtacccagccggaatcgtcgacgtccgcgaacgaggcgagtcaatatcaataagcaggcctgtgttcttcgtcgatgtcgtcgacggaactggagtctggtttccgcgcgtcccttcaagatcagctccgggctccccatctgcaaacgcaagttctcgactaccatcttcagccccgtttgtagcacccgctggcatcgaacccgggtttgcgggcgttatcgagcacacgtggttgacgcatgcgaagtacggcgttttgctgaatagctcgtgtgcgcaggcttggtagtactcggcggcttcgccttggattgtttggttgttgctgaacatgaaggacatggtgttgtgtctggttgagacgtttgagacgtatgcgggtggtggggattgatggcgttcgggggcttgagtttgagcttgagcttggtattgatattgctctggttcgaaggatcgggatatctcgaatgccttttccccggtcggtgcggcggtttctggtgtatctggtgagaaacaggagatttctttctcgcgccggatccattctttcgggcctgggcgggttgtggttgttgttgttgatggggttgagggtgagtcttgtgggaaagatgggctgagtggggattttatggaccggcctagaagaggcgagaggagatatgtccaccagccttgtgaatagggtctgttttcgtctgcttgggtgttgacgctgagacggccttgttggtgctttgggggcgggcgtactgtttctggtgtccggggtggactggcatcttcccagattgaggctgttgacagggcgcgcgcgttccgatctacgcctagtgtattgtggtatccggtctctgggataggggttttggtagcagctgagtgctgggcggggatggctggcacgggtggcacgtctgcttcatattgccagagacggggtgtgggctgtgagtagatgcttgatgttgctcttggtcggagcatctcggtgctcgagtttgagtgtgcgttccaaggtgcatctcctctcgctggcgtgacgataatcgagggtgtgagcggcgtgcctgcaccgtcgtgctcttgtgatctttccaccgactcgctgcgaggcacagtgagtccgatcatgacatggcggtctgagggtgagattacatgctgctgtctatcgtggaacgtatcttcatctttggcagcaaggaacgttccagtttcattatggctgttctgactctgcaccgtctcagataaccgctgaaagccccgtgaagtcctcttcttaaagatctcccttgacttctgagccgagcgttccttctcccgcactttggaaagcagcttgaggtcattcagatcgacaaagggcgcagccgcatttgtatccggaatcgactgtttcctcggcgccggcgccaagctgaaatccgtaaccagattcaagccgagtggtttcccgacgcttttgcgcttcttagtgatgcggatattcagtctcgagctttcgcggacggaaacggacgagcgattcccatctttagcgctcctcgcctcgagcttttgtcgcgttgccttggatagaaatgtaaagggtcggtctccttcttcctgatcttcggaggagcctgagggacttaggatttcttcgctgatcggcgatgatagtgggaagtttggtactgggacctggaggtctggttttcgtttgaacatagttcagtagacttgactgtgtcatgttagttgcagaaatgagaggactcaggtgtacataccatgtgtcaggaaagcatgaaaggacgaaagtgtagaaagacaaacaaagagggtgtctattaatatgatagcaaataaaacaatggaggcaacaatacacaatagcgctgaatagagtcgattgagtcagatgtagaacaaaagaacgacaaagaaataggaaagcccgagatttaaatcttcaaggtctatttctgcatcatcacagtgcagaagagcccagcccgatcacttacagcacagctcgagctataaacaacccagccaatgatcatcggcgctggggaatttctgcagcgatcccagacatcccgctgcaggtagctccgtgctgcatctttgaggtccgtcattggacggctggcagagagatcaccaggggaagaggaaatgaagggcatggattggacgagatgtcagactgaggccagtcactacgcgccgagccgggggcgggcgcttcgagaggccaattagtggaaggacagaaatagatctccagttagattaattgtaatacatacgatttgaagtctgaaacatgttttcgtgctactgttcatattccaaggatggatgtcatattccacgtatagatgcttttgaatagacatggatatccatattccagccattccagctattcaatgttcgtattccatatcccctatcttccatgcagagtggcctcatagaaaaaaaaaaaaagcaaagcaaagcaattgcgggtatgaataacaaaatatgaggaaaaaagagaccactccatgagatccaggaaaaaatcagtataaaccaaccccgaagtcgccagtcgaatggggatcgcatctatagagggatatatgataccaagagaaagtcagaaacgaagtcgttgatgataggttttgcgtgactagtcatatctcatacacagcttgagctttcctcgcacctcacgccacctgccgtcgctaccgtcgctcatactcaatgccctgcataggcgcactggagccgttcataagaggcggtagcgtacgcggctgctcctgggtcacggcattgccgaacccgttgtaggggccctggccattgacctgggagttcatttggtggtggtcgaacatggggcgggggacgccgttggcttgctggagctgagcgcgcatctcatctatctcggactgcataacggcccggtcgcgctgcgattgcgcgacggttttctccagcattgctatgtaatcaattgcccgtgtgagcgtctcccatttgctggatttgttggtttgcccgggcggtagacgcagccggagcgcttcgaagcagtctttcatctcgcttcgccgtttgcgctcggctagtttgtgcgttacgcgcagttcgggcgtacggctgtacggtgtgctgccgggcggaccgtcttcttcgccgatcaactctcttactgccttgtgttggagggagtggtggtggtgtacattttggggtaggtctggagattgttagtattgcgcgtgcaggatgtcttgcgcaggttcttaccgtgttgacctcgtggcatccgttccgagtacatgctattcatagactccgccatacttcccttccgggaaaacgcagggttggattctcccttcgagctgacagagcttgagcgcgccacggccgggtccgggaaggcatatgccatacccgccgtgggtgcttcagcattgtaaatctccgaccgaggattcgaggaaatggccggagcagtgcgaccggctgcaaaactccgctgctggtcggttgcgcgagggcctagcggagagagtggctggttccctcctgagtaccgaggtccccggtatgaattcatgtcggtcggaatccctcgctccctttgtagacttgaaacgatggatgattgggaggcattggtgctgtggtagggcgaggccgggttgattgccagagaactgatcccttggttcatgcgactgtcgacactgctgcgccgagactcaatggtctcggccacgctcactcgttgggagggagcttcgtagttctggttgattgaagggagggtggaattcggctggccgaagttgggagagggttgttgagtgccagcggaggaaggggtggtggattgatcgtgcggataaggggagcggtcgacagccggatgtccgcgattcggagagggttgcgacgcggagataaagctgagggagggatagttgttgccggtgccattggtcgctgtagagtaggtagacgatcctacatggtcagcaccgcgccgctcccattccgtactgggcgagggtttcctacttgtgctttgcggcattgaccaattcccggagtcacgctcaattgtgttcagcgaaccattcccgggggatttctcggcgggggccccggtccctggcatatttgcggtgagggttgagatagatgggagagtttgcgtggagcctgcagtcgactgaggccctgagactgcctcccatgggcgatgtgcgacagcaggatccatggcgggagaggcacgatcaggcggggggggggagtgaagaagaatcgaatatcaacccgctctttttcttccacactatcgcatattccaaatcgagagagacgagattgaattcgagaaacgattcaccgtgaaaccgttgtcaaagtttccaggttcgcgcgaggtaaaaggaaggctagatcggaggttagacctgagcggtccctgcaacgccgatcaagcttaccgtgggacggaggagtgaggtattaggatatagagtatatatagtattatgcagtcaaggccgagtcgagagagtgaagtagagggaggtgagtcgagggaaagattaaagaagtagaaaattggagactcgaaagccgaaagcctcgacggtctgaaactcttttttttcttttttaaccttctttttggcatcccctttacgcaagatgaaattaaatagcacggaaatgaaatcgaaaggaaaaagacggaaataaaagaaataaaagaaaagaaatgcaaagaatgcgagtactggtattaccgccaaggccctactgcaactgtgtgtgccacgaggctgaccctggggagtaaggactaggctatacttggcttgttattgtattagcacttgagttagattatattactgttattaaccctaactactctcttatacatactcaaatatagttacattcctgaatagattcctggaaaaagcaaggagaaacacgtttacacggagtcttaacgtcatttagcaatagaatataaaacataaaatagagtagaaaatagaacaaaacacaaaacacaaaacacaatatacagactagaatatagaatactattacaataccttcacgtggtcccttgcagtctcctacttattgcccagtcaagctgcattcgcgaccggggctcactgcacacacccgggagattagtactgtaaggtcagtctgtataaacaaaccatgttgacgttggacacatggcagaggatgcagggttgatcggcagtctcgggggcgaatagttacgtttctactttttctactttttctacttctgtttggcgattggaacaaagtactaaagttgtctagtacgaatccattgtgctaatccttgtcctccatgtgaagaataacatcttttcttcagtcccacacatggcctcttattcaccgagggttcacatgttctgatctatatcctcatccttatatgttcttatttctatttctatttctataatcataattacaatgtatcgaatacccagctaaaacagatccactccctttctgtttgtaacacctcggacacagacagaaagtgtgtcacagatcacccacgcttccatgagcttgagcttcataccgtactcatgcacccacccgtccctgccgcccaaatcatcacatgttgacctgtcagaggggcctagatgggtagcacagcggactggattatgtcgcgcggctattttcaccaacttcacgggggctgttgagggtaatatcccggttccgacagttcagtgtgacctagagtcttggcgaatatgatggatcgggatctcgatctcgtcgattggtgaagggaggtcgagtcagcaatatgcgatatattaatcatatagtctgatcgattcctttgggaagaggctatttacccgacttcctagtgaatacctgccaggtggcttttgggtgtatcgatttcatactccgtttgatcgggtgttcgtccagaaatagaccagccccaaccgtttgtaacctgtaaacctataaaatacactattgaaacgattgaatcaattgaatcaactccaaactccaatcccgtgcatcggcccaatggacaccgccacactgtggctgcaataacacgtcgtccttacccacatgctctgcactacctaactatgtatgtagaagtaatttaggcagcacagattcaatacaataaccatatgcatgtcaactaccactgtctatcatcttccccttccagcatgccacatggcaccatcgtcgccttgcagaatgtctcgatcgccacccgatctacggcacattcctcgaacctctgacaccgtagcacttctccatacttgacgataggacacagcttatccaaggctccaagctcaatcttgccaaacagctggtctttcggaaaaaaaggtccaaaaaaggtccacaaaacggcccatcggcaacgggaattctcagtacgactctatctctacaacgttgtacaccctatcaagggatggggtcactatagagttcactatgtcaatagtgcgtggctcatgcgaatgcctcctctcatggcttgcccatggctcgcccatggcaaacccccatgctctcccatcccatctgctcggagcccatggcaatacaccgtggcccttgcccattcctgcctccacgccttttcggtcgtggtcatgggccgtgccttgctgccctttcccaatagtctgtatggacgggtcgtaccgtccaggggtgtaggtactttttcttttcccttccttttcctttgcctttcctcttgcctccaattcccacttcagcttatcccctcgtatggcagtacccctttgtgcaataatggactgtaatgaataatgccccagtcattcgaaagtctcaagcatgtatgtaatgccatcccgcgcatgcgtctgcactaccacctcccactagctacacatatacaacgtagatcgtacatacattgcacatacctgtctatttgcatatgtacgtctgaagtactctttcctcttcctatgttgtatgttgtagacagcctccccactcaaactcctgccgacgatcctcacaccggctcccgttccccgaagctggggagcgcacagccaaagcttagaggttacatgcagacaaggctggcagatcataccgggatttccaaattagaatgtgagcacagatgcaattattcaattatcgtccagcatatccaccacgaccagaaacctcccgtcttgtccacccgtaacttccgcgtgccgccgcccaaccacctccgtcgtacaatgatttcgtacccacctgcacactaggtaggagtgttgttggctattctgctgaaacagagacaatattggcgctcggctttgaaatgtttggatccacttgtgactgaaataacaatggctagggtggttggatttgcctgtccttctgctcgtataaaatatcctctttcctttccctacgcatgatactaccggaatccactcgggtcttcacatgactggaatctcaagcctgacttccaccactcttcacaattgtccgcctccctagactcttattctgaagggcgagattcctcgcctcggcttcgatgtcatccacactccgagtgagcataatatatccctcgtcgtcgagtgcaaagagggcttccttcagccacacccggcaggtgattctctcgcggaatcgcactgaatccacgattgggatttggcgcaggcggtcgaggaagggcatgtggagggtaggattcaatactcctattttgagggctacgaggagtgcttggtcgtagatgacgctctcattgggcagatgttcgaagcgccaggtgcttgtgtcgatgtcgtttagtagatggtagacagagcctaattttggactctggtgtagatagaggctccagtggaatgtgtagctcttgtcgccgcggttagataataggatgtagaggccgtcgacttcgaaggggagctgtggtgtgtctatgttggactggcggcttttctctgatgttgacatattggatgcttatgaagggaagacacaacatgacttgtatgagcttgtcttaatcactttcttgttcgtgtcgtgacacttgttctacataaaccgcctaatccgaccagttcattggtttggtccaatgttcagtgtttcgcgcttaaaattgggtcaatgactagatgagcgccacagcagcctaagtaacagatcaattggagaaattacaggaactaaaatacaacgccattgctacctaaccccaactaatcccaacgttggtccctcaggctctcaggtgtcgatggatccatgacccctcactttccccaacatcggcccatcccgagtggaattgaacatcagacatatcatcgaggacaaatacaacagttaagatcgacgcgatctggcttaatccaccaggcctcaaatgatcaccactggcgaagctgagatgaggtcactaatctgcaatatgctgctactacactgctttatgctagatcagaaagtcccccccgtatccatccaacaattccttgatgatcccaccatccgtactccatatcttcacccgatacccaggcatgattggcagatcattccacgatctccctctccttgaaatcatcgtggcacaccacaccccttgcctgccacaaaccccactggattcatcctgttctcggttcagatgctgtcgcgtgtcgaatgtcagaacgccccgtagcaaaagggttgcactcaatacatagtcctggtggagccagtatttgccaaacatgtcttgtcttgcatgttgagaattccacggggaatcgtcgccgcttcccggcttccctccttactggatgtggatgtgtaaatgtaaatgtaaatgtaaatgtaaatgtatgttcggcgccatgtgtagcgtagctctcgcttttcctctgaggtacggagtacatacatgcatcgtacatgtgcactacgacataatgctgtcgatcatccacttgtgcatattttgtaggttgcttggatttacatttaggtacatgtttttttggtcgattccccccacttccaagattgtatcgattcggtagtttacacccctgtatcattcgaaatggtcgtgatagcccttaattaacactcaattcttcccttgctgtgtctcagatcgtgtcgccgcccgaggtccattgatcccgcccatgtgcttgtgcttgtttcagttcgcgcctctcgggatcgccccgcgtgtcttgtttactttgttatgggtttcaattgccgctgtggatgatgtcagtggactctagaatttgaggtcaagattggaacttgctaggcgctggtgcggagattgtcttgatgcattggtatattctagtctggttgtattttgaatgttgaattcaacgaattagttgaaaatgcgaatatgtatagcgagaatattggtccgacaatatctgcaagactgtaaacagttttaaatgttcaattgtcccattggacggtattttcgaaatcatccgcgatccgtatgagaaatatatctacggagtacgagaatccagcgtgattcgccaacatcacaatgagcattcttgctttgcttattacattagtcttctacttgtactccatgattttcacacgaagttttcttacatctcgcccgtgctgtcctccactataaatctacggagaaagtgggtttgcgggatccatcccgcgacgcgaaggctcattacaacttagcagaggaaaggaagaggtaaggaaagaacacgccgaatcgtacggttagctttgtcgtacatctacacgttggattgagctgtgaatgaaagctctattcaaattaaagcctttagggtccgtttgtcaatgatggctaagagttaaataggtctagaccgactcgtgtcatggtggacaatggacaatggacaatgtgattcctcttgaacttttaagctaacaaccaaccttgaggatatgttgcaactgacctttttatgccatagcctcaatctgcagttttaatgatgattcgacgcgcaataaattgagatagatgtatggctttatataattgttgatgctgaacctttgccagggctgagatgctgaagagaagtgtaaatcagaaggaatacagagttcatggtcagctacttcgcaggtaaacttgatataatccctgttatgtgatatgacatacaacttgttctctcttcgtttgtttaagagaacaaggaccagcaagaccgtaggctctctaacctctgcggttgtcaagggatttacatatctccaagagaaacatatccaaaccagaaccatcctaatataatccggaaatatcatcaagtcaattcaagtcgtatatgcgccatatataatatctacaattttttcacatgtatggatgcagccatgctcatgatttactcttcatcatcctcatcctcatcctcatcctcatcctcattatcatcttcttcttcatcatcattctcctcaaactcaacgccaatctcacccgtgatatcccaccggtcacccttagccgcagcactgacatacttgacgaacttgagagtgccgctatcccgcagcacaatgctgagtcggttccatcccgcttgcgtgctgaacagaatgccatcgtcctcatctgcacctgctgaccggtaaatagccgggtcggccttggtcttcttccgacccaggacttggtcggcgttctcctcatcctcctcctcttcatcttcatcctcatcaccagccatgtaaatctcgtacccacctagtgcgggaccttccacagcgtcgtcggttgttttttccttcggcttggatgtcttagcagacgagccattggcttctccatcctcgtcctcatcctcatcatcgtcttcctcttcctgcttctcccatccggtggtcggggtaagacagagcgagaactccagtcgaggctcttcgccctcatacgcactggcaagagtatagtccttaccgcgacggaaccgtctagcaagtaaattgtggctcgtgagatggtccacaccagtaacaagcccaagccacttccggaaaggctgtgacgggaacagcacgttcaacagctcctggatcgggttatcggtacccttctctccggaagcatgctggtacaaataccggtgcttgtgtggaggccgagcaaccgtccacccgcgctgtgtctggatctcatctgcagaatcaggaagaggctgtctctcctgctcctcgatgtacgcgctcacgcgcgatccaaatttatcgcctaggaaccgttctaggctgagcgaggactcggctgagaacgcgtctgacatctcctcggcaatatcgggcgtcaggtacgaaggcgcaatgtactgaagtaggaaggccaagtcgctctctgtgaactcgccctcggtctgctcttccactttgcccttgcccttgccttcgacttcgggggtttcccaggatactggctgtggctgcggcaggtcgtagatatcgccgcggccctgcagctgcgccagactgctgcgctcggcgagtttctcttccagtccttcctcgtagccgtcttcgccttcttgtgggatgtggaaccagccgctgatagccatgcgcacgcgcttcttggtcttgtcttcgtcgtcacgtggatagtacacttcctcgacatcgtggaagctctcgcccggttggacggtgaagaagctcagttggttgaaggcgggtggaatggagaggctgtagtccgggctgggaattttaacgtcctcccctttggcgtccttcttggtcgttgtcgggaacaagcgcagggcaccgccccactcggcttgccagggtgtgtcggggtcggtcaggtagaggatgtagctgactcggcggctgccgatgacatcgtcgtggcagagaaggtggcagccctcggtgtagacgttgatggccatgtcggtcttttgcccgcttagcttgccggagccagtcacggacgacaggtactcgcggaaccgtgctgagtaaatggcatcgcgcagcttcagtagtgacggcagtttcgagagggaggagtcatccagtccatcgaggttggcgagatcgccagactggaagatcttgtagatgtctgtttccttctcggtgaaggacacttgcgtttcgatctcattgcggacggagcgaagcagagtgggctcaatcagagggtgaatgacgccatgaaggtagctagagattgagccatgttagcttttgccattggaatattctgctgtatatacatacggagaagatttggcgtattcactggtgtacttctgctgctctgcagtgtcgaacaggccgtcgcggaagcgggcagcagcctcctcgctggagagggcccgtttcttggacttgggcatggaattgccatcgagagaggcccttgcgtctgtcttgcgcttcatttttgaggtttgcagaggaatgggagcttcaacagcaagtggcctgatgtttcatagatttttccgggcggtgagggggcgatgaggcggtcactgtgtttgtgttggatctccatgaagatcgcagttcacttctattgttgagtctattatcatttatacaatgtatggtacgtatctgatataattgtagtaaaatctcaatcagtattgcgttaagcgactgtattctaggaggcctggtctcttcgtagatgagtggcgcatagccgatgtccttgtctttctaataaaatagttctgcacgtcagtctttcctttctcctccttatgacctgaaagagcaagttcctcatacccaccgtcttcgtttcgatcgaagccataacagaacacatgtgattgcgccaaatccaggcaccggtgtcgtcataacccgccttatcaccgcaaagacctcgattgtccccccacttaaccccaacctgcttgattcttcaactctgtcgaatctcattatgcagcaaccaggggctgaagccccgatcccagatcagccgggaactccacctcgcccgccctactccccggtaacgcccgtgtttgctcatctcgtgccagtcgcctccaacgagccatcgatcgtcccgccacccgcatctccctctccaacatcacacctccctccacaatatggcaactattcaaatccccctcctccgcccaatccacccgtcttcaagccgcaaccacccccaatccctatctccgagagcgagaatccagatgccatcgcgctccgttcggccatctcgattctgcaaatgcagaagcagcaaagtttgcgcgacatccaggcattggatcgcatgaaagaggccgccgctgctgatccagaggggtttgcgcacgagctcgcagcaggtcggctgaagacccaggaccacggcgctgtgattcagttctcggaggacgatgcggacgacgaagagaatgaagacggttcaaaacgcacgaatccagacggctcaccagcttcgaatttcggccatatccctgttccgcagaatatcgtccgtatgcccccaatcaactgggctaagtatcaggttgttggagagccgcttgatcgcatgcacgaggagcagttacaccgaccgagctctggggagcctcgacgaggacgcgcgccggagcatgtcctggcatcgccgtatcggccgtttgtagatcacttggagggaccgtcgagactcggccgtcctaacaaggcgaagaagacttgaacacgccaacggttctgatgataatggatatgggattatggacttttacgaagttatgtactttaagattatgaacagagctggacttgtgttttcttgactatttaggtttcttggtaagttggcgttttgtcttgtgcactttcttgataaaaaagacagaaaggaaacatacatgatttatctatgccttgaaagtgtcaaggttctaaatttgttgtacaatatatcatataatcaaaagcagatgctgcaattatatacaaatccttatttcggattaaggagatgaccttccgaagaacaaccatagcttatcccatggtgagactcttctgcaaatgttcaggcaaagcaaacagagtttcttcaggcaaacaacccttggcctcatcaaccttcccatccttaagataaccgtcgatcagcctcatagtagcagtcacgtccgtaatcgacacaatccactcatcaatatatcgcccgacagcctccccactcaacccaacctgaatactccgataatctaaagaccgcagaaagagatcccgctcgggatcccactgaacgcgcaccgggctggcacgcagtttcttctgccattcctcctggcttgtctcactaggcgtgtagtgactcaaacaggaatggcgcaatgcccattcgaaaccttcgtgggtaatctctatcgctaggacacgttcctgtcgggctttggttgcccagcctgatcggtatgccatccataggaaagagggcttgatccatgtcattctctcccgtgaaaatggtgggacgaatgtttgggctttgagtgctggctcggctatctcgggggaatatgcttggtacactgtgattgtatttgcggtttgttttgctcggatagccttgtagttatttgagggcattttgagatgtgtggacaagtgttgttgaagagcggagatggatagataatattcatttgcgggaataggaatgatgggacattatcgtaaatcccactgtaagctcggaaattggacttcggcttttaagtgcctacgatatatcttggccctaagcctcatagtacacaccaagcctaatcgggactccgctatactccatcaccggatcagctgataaacccaattgaaaggatagtcttccttcatacctgaggccattgctgatgcctaaggactctttgtatatgtagtataggaatttccgctgacagagtagccgtcagtgcaaagcatcgagagttggactatggtgcggtgccaagcacagggaggtcttttatctgcaacaacacggctggcaactataaaaatttaagtttaagatgcgctggcagtcgtgagaaaatatgagaacatggagaccactgataagttcagtacagcgtctcgtgaataaagagcccttacttgcatcggttcgatactacagcaatgtctgcaaggaactctttacgaagttatcagacatagcttcgaataaaaatatcatagtatggaaaacactaaattcaatgatggtcttctgacaagaaaagctatgcacaagactttggcctagtcctgagctaggagggcctcctcaggtgaagaaaaaaaccccccgaggacacatttgtcgtgcgttcacttcttgtgtggacgctttccaatcacccgatcgattcctcccattgcctcccagtaacgtgcatgagcctcctgggtacgcttcctgttggtctcggcatcgtcctgggacatgtaagaggtgtcgtcaacctcgaagggcgatgcatccagagcttggttggtgcctagcttttcgacgatcccagagtctacaagaagccgggtgttctccctaatgcgttgatcggcactggggtcatcaggcttgcaggctgagagaatatggttctcacaagccgcattcacaggcggctgtgcgagatggatctagattacttgggtcagtaaaggatcggggagtagtggtctggaataagtatcttacactggggccaccagagggcgtgacaggcctggatgtcaagatgcttccgccgaggggaatgttgaagctggtgttggccaggatgatggcatcggcgttcccacaatgctgatagtgatattgattcatggaccgtctttgggcctcagggacatggggatgattctccatctcgataggtggtggaatgacttgatgatgttagcatggatgggtcaaggtgaagatgagattaaagaagaatatactcaccagggggtggttattttggtcttggggatgaaggaacagagacaagatccttgttctggcaaggctgagggcgttttgcttgacttcttagaagaagaggccggtattttgaaagattgaaagagatgaaagtgtcaagcaatggatggtacaatatgaatgtcttgagaagttgaccgtgaggcatgcagttgtgatgagcaagtcagagaacatggagcggttgatgctgtctgtgtcaatcgaaatgtcaatttattactctcgaatagaaggagcgatagccatatctactagtcgctatactaacaggaaggacaacacgaaatcttagaaatacaggattcaagattcaggtcgagatctcagggtatcgtcattataatatgataacatgaaagctgcaagatgagcttgaataaatgcttttgtagtggtttcatattagccatgtacaaccatgagccggaaagcaaatagaacgctagattacctgctggttggtagatcaatacgggaggaatccttctttaattcagatacatgcacattgttcttctcagtgtgttggtcatggtacattttgttgctataactagcctggcaggtttggtccaaatgctgtgaaaacatctagccaatctattccgtgcttgggctaagagctttatttccagcctcttcggaaatatggcactgacacaataggatgaggcattgttctaaatgcttgaaccaagaattgagtatatgtacacattctggtataatatgaacaaaggaatccaagagcttcgaggttgcacccactcaaagcttcgctttcccattcttctcaaactgctgtacagcctctagccctctttgccgaacagcttgattcttctcttcgacattcttccgccactgcaagtttccagcatgatcatccaagccgtttaagatgccacaatacatctcctctttcatggtaccgtagataccggtggcagctttagtctggagcttgcgggtctggatcagcgcaagcgcttcctcagctccaccaacggcatcaacgataccagcctcaagcgcatttcgtccaccaaagcggtgagcttcgagaaccacagtccggaaaacgactggcgtcagcttctcgcggaatatagacatcatgggtgtctggagcgggacgccaaattccagctcattgatacagaggaaaccacggtctgggttcatgactcggtagtcatgatacatggccaacatgaagccggcagcaaaagcgtgtccatttagtagacacacggttggcatggggtatctagggaggatattagtatcttaaatatacataactcgacttgagcctcggactgatcatttaagaaaaaaacatacgtcaggaagcgtcggaacaatcgccagatccagttctcgcagaaccctttggttttcttgacaatgtcgagatccagcccattgctgtagaacttggcaattccactagtcgtgactaagacacctttcgggtagcggtgctcgacaatgtcgagagcgagcagcagagcatcaataaaaatgggtgtcagtcggttgtccgggggtgaactaaaggtgagcacgtagatggtctcatgctctttcgctgtgctagggtttgtgcagacgatcgagcctccagtagagctgatcgggacggtgaaaagagtcgtcatgatgggaatatttggtgtatggaagttgttgaggaaacatagcttgttcaaatagatcgattatttgaatactaatcagacctcggcaccatcacatgccgcaatgatgtcatcacgtgattcccgaagccattcaaaggaaaacacatcgctcgtgatatttacagctcagaagatcttcagcctacacgtaatgaaccggaattcacgcttctctcgataggaaattgttcctaccggggggcaatattttatttgtccgagctcgcaatagaacatccatgccaacccaaatacgaacttgtcaagctcctgatacgccgtttcccacattgtcattgacacatttctcttggagtcggcatgttcagggtcaaccttagatcattagcgcctcttctgaacatccttctcatccctacgtgagtttcttttcagcaggggtgacggcctgcgcgaggaaatgataagcggatccaccatcccggccgcttcggggtaggtggttggaagagaactgcttcttccctcaggtgaccatgtccttacccttgacgatagccttgaatgcggcaatggcgtcgtctagggatacgacgtctgtctcaactcgaagattcaacaaccttggaaaaagcttctagatgtgcacaagtagcggtcagttatattgtgtaacataggatagctattgaaacaaaccagaatccgatcagtaagatatccccaatggtaaggaaatagatagataggcccatgccaacgttcgatttaaagtgtccggagatttggcatgctcaaatccggggcacagatactctcttcggtgctttagcgcgaaagaccagagtaaggtacaaagtgtgtaacttctggaagaccaaattttccagagctggtttgtaccactgcttcagtcttctggctatatgttttcatagttgcagctttcacaagaccggcatatatctagcggcgctctagggagaagtttatcatgaactcgtccaggtgcatcccacttgatatttccatggagctccagaatatacgtatcgtgacctcggggcgacgaactccacgtgtccgttgagtctcccctgaactggcctccgccatgccctcgcagaagatccccagatggggtggggagggcgaaaggcctggggagagtgggcggttaggggcccttttggcagaggcatctttgcctagagagacactcttggtaaatatgggtaagaattcccacaagcacttctcgtttactcaccctccttgccccagagcccccaatgcgaagtcttcttctttttctccaccctcttctctatcttcgcgaccagaaggcggtacttctccttttggcgtacttttttttggccttgcggtactcctccgtcatcaccctccgtgggtcctccggtctcacttgtctagcatgatgcctatgcatatatctattagaaggatgcatacagcgagtatcattgccgaacgttccatgccaccggtgttcacaatgaagttagtcgcatttggcggtttcgacctgacttgcagacattcgaattcgaatagaacttgaaggctgcctgtgatcttcacattttgggacaggatttcggacgatctccatattttggtaaagaataggagtttggtcggccccgatgagtcgcgccgccttgcttgcctcccaggtgtcttccgtgatgtcgtcgggacgatccatgatttgctttgatctgtctccgctcctcgggtagaattccgaaaaattggctaaggggcttaagtgaacaccgttctctgtgtaagagattgttggatccgttgggctgcaccgtactgtcaactcgtacaatcttatgattgttgtagtccagctgtaaggaattgttattggtcgccgtacataggccggctgggcctacgacttcgccgaactggaaaccgcggtatgtcggtgcctttgtctttgtggattttaggtgcatcagttaggaaatgagccatgtggccgcgataaaagtattgctggccgtgtacctgtctgacttcaatgatggtgtgtacgcgagacatcagcatttcctcgacctgggttagctctggtagaaacgtagggacatccccagggtccatattattctagacaccgaataagtaaacgcgatcagcgggtttcttgatcatcgctgctttatccttcttgcgacaacgctggcaaacgcccaccgaagggcctcggactgagagctggagatcgaattcacagtgaaaattatatgacctgtctgcattttgcaagtggcaagaactgcaagagtccattccttactcgaccatgtagctatgcccgggatcgcaccggtccttttggtgaaatcgcaggcgatgcaggcgatgcaggcgatctaattgagaccgcgtcggaagacggtaggctggcaacgaacttaatacagagcctgtggaacgggattggcggaccgattatagactgtagagagccgtacggtctatgccgtctcgtgctattctggagacattccaggcaattttggtgtattgtttcaggagccgcattcgcttgaattgaaacacctggctcatgatattgtccccgattcgctcacgaaagacgtacttgggatcaagatcgggttcattgggattccaacctttttgacgtatccgggagattgacattggattcgttgccggctttttccatcttgtctgccgttttggcaattttggcggtgaaatttggccctcgtagaattctttgaaatcttatgcatcttatgcaagtgcagcaggatctaattccgggccgaaggagtagaaccggccttcgtctttcgcatggaggtggtgacatagcgaccttctcgcttgtgagtagcggctcaccgaggatgatccatttcgaggaaagagatagggaaagtggggttaatttgcaggagggagagaagcaaaccttgggagatatacctctggagaggtataatgcctggggcactaatattgaggcctgaggttaaacgcaactccactgccggttgcgcggagttggtccagtacttcttcttgcagtaaacacgggggaaaattctccgaggagggctaagtggaaaagcccttgccgtgtagtgatagtccttccttggggttcatacacatcgttgaacaagaccgtaagagagagttggagagtccaacctttctgaggaatattgtttcctcatatgtggatagaaaggcatgtcgaacattcagttcctgcatgtagcgggcaacctgccctgtaatataatatgaatacaaaaagtgtgaggtatgaggtgtggaatggaaacatgtttgaagtcaggtcatggggtatatatctgtactttaggttgccatgagaaactgaattgaagaaaaccttcctggtcattttgattgtcttttcggatgtcttctcagatatatatatcctgcgaaaagcatagactgtacacgtgattcttctttataaccttcaattggtaggcaaaaaatttttatattaagactatactgcaggcaaaatgtgatataatgccatactcctgggttcaaaggcgacggctttataaatcgaagcaaaaatgagtttaactctcatactatcacttggtagtgttgtgtaagcctttattagacttccctgctgtcttacctctctttcactcggaagtcagatctcagtttcggatatcttgtcacagacaaaagaaacaacaaggcaaattgattcattgaggggtcgagatctcgagcacgtggaaataataaagaaaaatctaaacaatgagcttcaatcgctttgagtgtctctcatagcgaggtagcatctttgaagtgtacattaggcaatgataagtctcttggtcccacataattttagatcttttcatctaattatatatttgactggacaatctctcttgatactcagatctaacgactgacatacatccacaacaatgtccccgaaacccgtgtttggcccgggccttgaagtggactacaccaacatagtccaaaccgtggagacacagattgaaactctgacatacaaggcatggcgacgccatgaagtgattgagaaactcgaaagcctgtgtcgggagctggcattccaagccacctgcgatgaacgcaagcctcgcagccatcttcttgggtacgcccaattccaacgtttttctatgacgcttagactttatttacccgaggcaatcctagtcctcacgagtgactggaccagttaccagataagtagccgggccttcgactgggtgcgagaggatgagatggaatatacggcagcttgtgtcctgaaggaggcacttcttgccgcacaatctactgactggtatctttgacatggattgtccggagtattgatttctcgatggcatattggcagaccctgattcactgcttagttattaagcagttctgacaaattcatctcaatcggcatttttcctgactcgtaataggtggtagcgcccgaaaatctctatcggggggtcgaagagaataaaggggtaggagacgaagtgtatatggcaatgtcggtgagggttgaagtttctgacttggccaaacttgaattcccagaagacaccggtatccgaaaagcctaatctgtcggaatagatatagccctctgccggggcgtagttgacaatttcaaccgacttggcatatatcctgaactgcctttgagtatcagtctctccaccggctcagtcggtcatgccgttgaattttctcggattgtctcctgttcagatctaaggtcgaacggtatcggcctctgttggaagagagtgtgacctttcgcatagtcgactgtccggacaacggtcaatcgctcagtgcttatgtattgtagtcgtcgattgaaattgtcgggcactatcttgcttgtggatcgtgaactcagcactaccagacccagtgaccaatgtctgtccaatcattcaaaaccgaagtgcgtcaaatcgtggttgatatgacctttggtgttacccctgttagacgtaggttttgtcgaaggcattgcaacctggggctttcgaagcgagagcgaggaagaataaaacaagagctagaaaatataagagtcagctgtttatatctgtgaagatgtcccaaagtagtaagagttggtgcgaacactgcgctcatgcgtaaggatcaggtcttccctcaccattttcggtcaaataagaagttagatataaccattagaagaaaatatagtaaataaaagacagtatgattgaactcctataaaagtgttaagtggcgggattgtgtctatccatgattccatacactgtgcggaaagatagggctagcggggcctcaacatagagcgagtccaactactttggcaaggagatcatttgtctgccatttcctgcagtaatgttcaagcaaaaaaaagctccatagactaactgcagatggaccagggaaatgaagtgcttgtcaaagtagttgatctcgatctaagttgattccccattcgtactaggacggtcctatattgcaataatgttagaatagaataatattaatagctccgatcaccttcatttccgaatctaagctttcttagcaaaagagaaaataactaaagaggaagccgaagaggcgagctggtttttaaatactctgccaaagggcttcgtcaccttgacaataccaatccaccgggctttttccattgtttttcttttcttcctttcgccttccgtttccctcttgtgtccactttttaatttcctcgccttcctcgttatcaggcaatagccaatggtcggatattgttcctgatctggttctcggagcggatgctggcgggctaactaaagtagcgtagccaatcggcatcgagagaagagccgggtaattacgctgcctgtgggtctgcaacagtcgcctaacccgatgcggcagtgcaatttgcgctaaggagctagctagtatatagcgtcgagtcaagcttcgcaaaacctttgcctcggactcggagatagccttagtctctccttgagtctccatagcttcggtctcaactggaacgatttgcctagcactttcggcgctaggctggactaagtatgggcaaggttctaattacagcgcgaagtggtgattcctttagcctacgctctcgcttattgacctccttaatcttgatttttcgagcagtcatggcgagtttttcattaaacttatatccactggctctctgatctccttttgtggatgttctttttagaggctaattctcacacatccatcccctcccgcgatcgtgatacttgctttacattgcgatataaagcgacattgtgcgcgtgctaggaccggaccgagcatactgcgttaacgaagacctccgacatcatgagatcctggttctcgttcctccttttgtccctgacgacgattgtcggggtcaccaatgccaccaccgaatacacggggacaacctgcaaccccctcaacaagacatgtgatgcggatccggccctcggaacagagcacacgtggctgttcaactcaactctcgacagcgatctctgggacatgcgcaccggtactctggactatacatccgaaggagccgactttatcatcaaaaccgagaacgcgtcgacgctcctcgtgtccaacttctatattttcttcggcgtgatggaagcgcacgtcaagatggccaagggggccggtattgtcagcagtgtgatcctgcaatcggacgatctcgacgagatcgactgggagtgggttggatataacacgagtggagtgcagtccgatttcttcggcaaggggaataccaccacgagtgataggggcggatatcatgcggttgcaaatgccgataccgagttccacaactatacctcgtactgggatcgagaccgcatggaatggtggattgacggtgacttggtgcggacagtgaactattccgagccgttgactgtctacggtaaaaactacccgcaaacaccgtgtcaggtcaaggttagcaactggccagttggagtcaagggacagtcgcaaggcaatctggaatggggtggtggtttggttgactgggacgatgttccattcacgatgacggtatcgaagatccgcgttcaggacttctccactggaaaggagtacaaatacaacggaaccacgggcacctatggcagtatcgaggttgtcaggtgagttttgttctgaatcggttattcaaagaatttcggactaacttcaactcgcagtggaaactcaactgccgtgacagtaatcaacaagaaaccagagaagaccctcgcccagaaatgggctgatcttggcaatggagcgcatatcggtgtgtacgtcggtgcagctgtggctggtgcgcttatgattgccggattcggattctggtgtatgaagcagcgtcggagcggccgtctacaacgcgctttgaacgatgacgaacacaccgccgagctcacgacgttggagcagtcaaagttgagatggaggcaaagtgaattgcgtagcaagggcagctaccagccggttccttaagggggtcagttggattgtatactatgtttcggtcatgtttattaatttaatgtagcacattgttatatatcccgtttatttagagagttcaaagccggagttcgtcgtcggtcacagcatagcatattatgtgtttgctttatcttaggtttgttcgctataaactcgaggaacttagttcgtagtagataccgatgaatcgctcggataccagacaaataaattggcacaggatagatttccggaatgcttggatgcaaaccgaagggaaaacaagccagatagttgagtcagtaacggatgtcaatccgcctaaacgaaatctggtcattggtaccccagaacagatccgatccacttgcactcgcccactcacacctatctcatcagataccatgggatgtattgggatagtatggtgactggtcaaaagagatttgtctgcttaggagaatgaagtggggcgacgatcatctcgagtcatgaggacaggctttgattgtcctagcagatggtggggccgtgtgttcttcgaatggggagctggggagcagatgtaatccggactcaagaactgaccgggagggtgacaggtcgggttggtctggggacacttgtgcagtactttggtggttgaaatagggaagtgcagacatgaaagagaatctgaccggaagtgacatgtcggctcaggtctgggcacattcgtgacgtagaggttcaactttgctactctttcaaaagtcaagcaattcatgacgcgtttggcgccattcacgccgccatcgcttcgtcgtcagaaagaatactcggtgcgctgctcacacctgaactgtcgctgtccgtcacctctgaagcccgggcacgaacctgcaaaccccagtcttggatgctggggacaccaccctcaatgacgacagggtgttcctcggcactctttcctagcacagttccagcatagcgcgactcctcgccagtcttactgtgtttcttcttcaatgcagtcaggtaatcctccttctcgacggcgtcagggtccaccatgtcaccctcgctgggcacaaagccggcaacacgtcggatttcacggtgggcggggccggtgatccagccgaggaaggcatcaagaccgcgcatatcttcttttccctgccattcctcttcccattcgcgtagttgtggtcgtatggcgcctgcgtcctgcagagcttggtagatgtcttcgaggtcgggaactgggtcgtatgggtgcgcatttgcggcatgctcggcagcagctgacgcgagaataatcagatatcgcccagtcaggtcctggatagactccaagactgaggggcgtgttgagtggaagccttgagcacggaggatttggatgatcggagggcggaggagagcgttatgaaggttcgggcccgacattttgcagaatatatcggcgaagaagacagagagagtagagggacgtgaaatgaaatgtagaaaaagaaaaaagaggagtgttgaagcgtacaggcgactgagtgcgccatcggggcataaccctctcattggttaatattgccggcagtatttaacaagtacagtagctacgtcaaaagtgtagtacatcaacttgtctaccatgtatatactctccaattgtatttgatactatgcaactgtatgctgtgtagaaccagtttttttctcttcttcttttcttaacccacataatggtagtatcaaaatctttcagaaagtagtataagatataccaaaaaagacatcaaaaagacaatacataatacggagttgtaatgccatacatcgcatactaattacagccaacactagacatacctaaagtattttagcaggttgtgtcgctagatgaagattgtaaagtgatgtacaacgcgtacgacataaggtgtcccatagaatcaaaagatatatcggaatgaaaagagggatgagttctttataagcttcaagatcaaatagttacaccattatgaagtacaactaactactccgtataggtataaaattaggatacaggcctcgggaaggcggtgatttggggcggtgaggtggtatccaagagagctatcgatgccagtagcatacttagtcgcccatagaagtgtcgaagagacggagaggcgctgtgacagggttaagtgtcaagagaattgtgaaagcccatatctgatgtgccaggctttccatgccgacacgagtcatgacaaaatcactcttattctgcggtctgggctggcaatgtatgtcttcgaagggaatacagatgctaccttgaatatggtcacagcctggcgccggatccttggtgatctccatattctgcaccaggaagggaatcccatgctcgttgcttttccattgcgcaatcgtgatttttccctgcagtacttcgatactgagtacaacgttcacttctccgttgctttggttgagccaaaacatcatgtcgtcctcgagctttgttggtatctcctcgcatgctacctcaactgccatgctaggccatttggtgccaaaaatgagtcggcctccaggaacaatcggccctcttgatccgccctgaattgcctcggactgatgttgaacccataggaaggagcatataatctttctccactatttaattccaacattcgaccatgccgaagaaagaaccgattgccactgaatgtgctccagtctcgagtctgataagagcatggccaatggaagggtcgtagctctcgcatgattgtgcgaacagattttcttcaacattcatattatcaaggaaggaacgctcatccataataaaaatagtataagggttagataactctgtatcctgtctatgtcgctccagttcctggtctagaatttgaagagcatcctcaattcccttaaactcatattttggggtcgtagaaggaaggccgtgttcaaacatgatggatgtgaaatgtgagagaaatttcaatggattgtaagagaagttatagtccttcagacgccaaaatgacacaatagttagttagttaactaggatggacatggtgcctattatgtaaatgtgcggtaaccgccccggtggaacctcacctcctcacttcctccactcaccttactcaccttacccttgctaccaggtatcatcatattgcgactatgccgcctttaaaaatcaaattctccaggaggccagatccgccagaagaaccagcgcctatacctgcgcccgtgcctgcacctgcgcctgcacctgcgcctgctcccccagccgaaactccccaagccccccgcaagatcacactcaagatcgcacgaaaaccacaacctgagagtgaagaaaaaccaaagaagaagaagtcaacaaagaagcgaccagccgaaactgccgcacttcctgagcttgagcacgaacccgaaccggagacgagccagcaaatccccaagcggataaagctgatcccatccaagaagcctgctttgcagtcaatccgcatcaaaaataaaggaatcgttcccaaccgaccagtaggtgttgggtatgactccgaagcctcggacaccgaacttgatccgtccatcgaagaacaattcatcttacggatgctccccggagaggactgcgatattataaggaaagtaatcaacgacaggacattcaagaatggcgacgtcgggatcaaacccctcacacgggagggccggcgctctatcgtgaatgttcggggccaccaatatgcggcagctctcgtggatctaccctgcatcatcgagggcatgaagagctgggaccgacgaggctggtacaagtcagcagatatctgtcaaatgctcttagttctgggacgcgtcaacagtgaccaagaagctatggaatacccactccccccgggcgttgactctcccgatgaaaagacacttcaatacgcacacggtatcgcaccacccctccgttgggttcgcaagcggcgtttccgcgaccgcgtcagcacccgcacgatcgaacaagttgaaaaggccgtggaagaactcatggcccaggacgacaattcgattttccctcccaagttcgagttggtggacagcacatccctgaatcgcgtcgagggcttggtacaatcgggaggctacggggatgaatacgacgatgagcaggatgcatacggtgaagcggaagaagagatgatggacgacttcgaggatgcgcttgctgccgagatggaagcggcattggctgccggggatgatgaggcaccgggagcacccgagcaggcacacactacgtcccagtcgttcacaccagctggaggaccgaccgaacgcggcgacacctctgcagatgagagcaacatatccgacgaggacgaggaagatgagctggatgacgaccaaatcgagcagcaacaacagctccagcagcagcgcgaggaagtcgccgagctggaagctctcatcaaaaccgagaccgcacagtgggagaaggtgcaaaatcatattttgcgcaacaagatgggccgacggatccaggaactaaagaaggacctacaactgaagaaggtctctatgggcatgccagccggggacgatatctgagctcctgtttcacatcctatgtccaatgggattttcggcgttaccatttcataatcatacccagtttgtccgaccgaatgcgagtgcggtctctatgttgatacaagcagccttagctagctcgaaataatgaaagttatgtccaaacattaacaaccagataaatcacgctccttccatcgccactctaagatcgagataggtactttcaatacctatttactccgcacttaccaccggatcaccagtagcctctttaaccgcctcctccacatccaacttctcatcccgttccaacttctctcgcctgacagcctccctctccgcaacctccgcatccgccccaggctcacccggactgctcccaaccctctcaccaagaatgcgatcatgctcagctctcttcgatcccaaattcgccgccagatcatctgcttccccgaaaccaggatggccaggcccacccgcactcccaacagggccagcatgagcaccggcctgcgcgcgctgcatccccatccccttccgctgaactgcgtccgcgatatacccctccgcgggctgctcctcgacgccgtattctaaatcgacgtccggcgcattgtggagttcctgttcgtgttgctggtgctgtgcgctcagacgggctcgtgcttcgtcgcttgagggctgggactctgctgtacgtttaattaccccgatcgtgtcgccgtgttgtcggcttgtttcggtccctgctcgttgctcttgtggcgtgtgtgagacgggattcgaggactgcgcgtaggcggcttgtttggggggttgggcggtttgggcggcggtttgggagcgggtctgcatggtgatacaatgggatctagatttatgtttcggatattggatatggtcaaggggtaagaggttaaggagtatgaagtaagtatagctcaagagctggataaccggctgaagaaagtgacagctgagtacccacttgtgacgtcagcgtcttcgaccaatgagagcgcgtggaagtacaaccctaaggatagtcgcgacaagatttggttggctcaatggttcggagtagtcttgttagatgtcttttgtgtatagatctctttcccctttcttcgtcttaagacagacggtagagaaagtcaaaaaatgcttgatttagtcttccatgtataacttgaatccactctacaacataaggggtaaatcaactgcacaaagtactttgtcctcggcacttctggactaactcaataagtgcgacccagcaaggctaccgaatcaacgacaatcgccttattctgcacagatcgtcgtattgtcccaaactgtcgggactccaagcccccaacacgaacagtatcagtatctcatcccgtctacccccgtccatgtggcgccactaccacctgcttctagactaactccaactgtaatccaagtaattcaactaatcagactaatcagaccgccccggaagtatgtcacccaaccccctaacccacttcgacaccgtccgaggcatgaattggggtgaggggaacattgtgtgacccagtccctccccactcgttttctcgcgatgttcttctcctatctttcacataggctgaacgcagaaccctctcggtatctcactcatggctcagcaactctactatctgccgcgcggctcgcgcatcctggtcaccggcgcgaacggcttcattgggagcaatgtcgttcacagtctgcttgaactaggctacaaggttcgcgggactgtccgcgcaccgaaaccatggctcgatgagatgttccgcgggaagttcgggcgggactcgtatgagtctgttgttcttactaactttgagaacgtggatactcttgttagtgtaatggatggtgtgtctggcgtggcgcatgtggtatgtatttggcagtggaattattcgatgggtatgtgctaatgagacattgcgctgtgtaggcatcagatgttagcttcagtgcgaatccggaagaggttgtgccgtgggtgttgagagctgttcataatgtgctagaggctgcatcgagaaattccgctatccggcgggttgtcatgacctcttctgcggtcacggcgttgtttccggagccgaataaggagggtgttgttgttcgtgagggtgagagaccacttcttagagaagggaatgcaaggatgtattggttaatattgtatctagactcctggaatgacgaggctaccaagctagcctatgattcggatgctccaccacttgtgaagggcctttacacttatgctgcctccaagaccgagggagagaaggcagcgtggagatggatggagaagaacaagccaggcttccaattcaataccgtgttaccggattttaccgtgagttctatgccaggccatcaaacgtatgatattgacttcgattagctcgggagaatcctacatgaacagatccacggctcgacaatgggctgggttactggcctacccaaaggtgacacacgtatttttgagacatttgtgccgcgtaagttgacactgcttgattgttcgatcattgctgatataaaaagaatacttctgcgatgttatcgatattgcgcgtctacatgtggcggccctcctcgacccaaatacagtctcccgtcgactcttcggatttgcagctccgatcaacctcactgatataatctcagtcgttcgaaagctccagcctaataatacattgattcctgaacctcctgttaacgagggccgtgatctgagtgaggtaatcccggctaaggacgcagaaaggctcctacgggaattctgtgggcgaaaagggtggacttcgttggaggatagtattgcccagggacttgaggtatctcgaaggccgttgtgttctttatagcgtcccattgatttcgcaaatacaataagaaatcttcaagttgttgagcagcaatagtgcagaacaggtgacattctcccgagatctcactctgcagtttccgactttccacagactgctggtgccatctttctcgctttcttcgccgtcaaaggtgttgaagtattctcttgagacaatttgtaggcattttggctgcgtgcaacacgcccgactgttgacttcgagagtcctctatcgacactagccgcaatagcagcccagctgggtcgatcatctttcctcaccaagcgcgcagtataacgcgcagtttgatcactcaacttagaagggcgtcttcgtccgggctttgaagacatatctttgcgttcttgaaaacgcgttttcgtacagtaaacagtggatcgcgcgacgcgaagatctttggcaattttgatggctgaattcccattttgaagggctttgataattgctgcacgtgttatttctgataactcgcttggagccggctttttggcttttgttgattgagacgtggtgaagtatcgttgcaaagagacgtaattccaccgtcacctacttgccgacatcctgaccgaagagaatcagttacctcggcaaaccgaacatctacatgtaagaccaaaatgtattcaaaccaggcttgaatatcagtccttcctattagaaaaacaaaaaggcgtggttaaagtgtaataaaccattgtgaatatcggcagatctacccctcaacaagaaccactcccatcaatggcagattccacacctacgctacagcaagctgcggtggtgcaaaacccaggagaaaatgcaactatcactcttcagaatgacatacccgtcgcaagtcctggacaaaatgaagttctcgtcaaattaacttgcaccggcctgtggtaagcgcttacattccgaaatgaattcaccctcgaaaaactaacccataaccatcaaaaaagccgctcagaactccgcgctgttttagcctggggtgcatacaactccatcatcggccacgaaggggtcggaattgtagtaaaagcagggcccgatgtctcggagtcccttctcggtgaacgagtcggcgtcaaatggctctacagtgcatgcaacaaatgctcggtctgcaagcgagggttcccgaactattgcgcacagcagctcaatacaagtcgccatgttccggggacattgcagcagtatgttatcgccgatgcgcggttcctgacattgatccccgggggcgtagccgatgaagttgcagcaccgctactgtgcgctggacttacgatggttggtgctttgtcgaaacttgatcatgagctgcaggtgggtgactttattgttatttcggggtctgggggaggtttgggccatattggggtgcagattgcatccaggatcaaaaatttgcgggttattgcggttgatagcggtgatgataagagagctttgagtttggagtctggggcggaggttttctttgattacaagactgaagatgtggttgctcgagtgcgtgagttcactggggagggtgcgcatgcgacaatcgtcgtgccgggtacgaaggaagcattgcagatggcgcctaacctggtgagaaacatggggtttgttgtgaatgttgggttgccaccgaatgacttggatattcctctttcggctacactttgcacagcgagaggtaagatgacggtggtctcatagtcaatcatatactaactctcacaacgataggtctcacctttatagggtcatctgtgggtacggaggatcaattgaccgacttactgcaagctgcagctgctggaaaaatcgcaccatcgatcgaagtctttgaattctcggacgtgccgactttgatagagaagctgagggatgatggtattatgggacgcgcagtgatcactttgccacagtaacttgacattccatgtttcaattttaagcaaattgacaagagagcaaaggcgagaagagaagggttgttgtattcttattcctggtcacacttctacagctacctagtcatgaaaatatattcccataaagacatcgtagtgttaccagaggtataacgtccctaactaattaacatcttggagtcaggccaggtcattaaagtcttacgttcagtaacgtagctttgtatatataacgaccagatcattcccagttctcctgtcagacaacttgaccacccctgctccgggtgtcaaaacctgaacccaaccaacctacttcttgatgatctggaggaccggtgatgatactggagcaatccaacaatgaattgattccggcagacgttgttctcgtctactggatgatgaaacaattaatctcaatgagtggcttgtatacttgtaaaaataagttctagctcatatccactgagccaacggtcgtcccaaccgtcactacctccattgacggactgccttatgaatctcatgaatttgctttgacctagagaccggtatcctgcccattcatatatgggaatagttgggatgcttgtatatcttcttcgtcggtatagtcatacagagcaggacaccaaatccatggcttggtaaggtgactggcattataggctttgatcatatctgcccgaaagttgtcttgctggcttgtgtcgcgattcccgttgcctgtgcctttgatagccatgcccggggggattatgagctcattgctcataatcttccacctctattccattccaagcttcgatcatgccggtgaaacaaccgatgattgttgcatgtgctttagtctccattctgacgacaagtttgttgatggaaggatcatagagcttgcaggattcattgtgtcatggtgattattccccgtttttgtactttgatgctgagtacaacaccaacttctcagttgcttgcgttcagccaaaagattataacttccacaggttttgcttgtgcttctgaacaggctacctcccttgaaattcttcacggtttgagtctagaatcttggctgtatccatcttctggactgggaagcaattccacgccctgtccggccctccactattatctttcccttgacttgtccgttactttcattaagagaagcctgacatccttctcaagcttcgcccgtgatttaggtgaagatggggagagaagtaagaagtgggaatcaatccgggagggtttatatagctcttcagaggtcatatgaacttgtgctttagtctaacctaccccggccaacgaagttaggtaccgttcgtatgttataccaatacaaaaggtactttcttataccatatatacggcacctaagtaagacttcttgatttttttttggcatgcaatattgactaatggtaaataggcggctaggcctccggatactaaggtaaccttggaagtatcgtagcgaccgccttcgccttccatatcgaatacatacagatatacaaaagaatatgaggaaaaatgggaagaaggattactgcccatggaccacgtgtactgggcgaaattcaaaattcataaataatgagcacaaactgagattatcgttgcccgcgccaacaccaggaaggtgtgctgggcgcttggcagattccttcgaaggacgctatgcaccgcgagagcagtgacatcagctccgatccccgattcctcccctctccaactccgtaattcaccatggtttacgcatttatcctcccaaccgtctcgcctctatcatttcaatcattcatctcctctgccactcatccatccctcccccaatcagccacaacaacccgccatgcactccgcctcgcattgaaggcccacaagcgcctaccccgcggcccgcgccaggatgcccacctacccgccgttctgtccgccttgaacgaatacatccccttcctgttcgcaatctcaaacggactgaatggtcgctctgttacagcgaattcccaagacggctacacgacagggggaacgaatatccgcgccgaagtagtcgacatcacagcccatgcggagatagagtcgacatggagatatacgctgtcatcctcaggcgggttgaatttcgggcccgggggaaataacacaagcggaaacggtatccgcacgcggaatggacgagtctctggccgcggcatccacttcgaattggcgtttacgctcacaacgctcggttacgtactgagtaggatggcgcgcgcaggagtcgtcgctacgttatacgcaccgtctaccccgtccgcggagactcgtacggctgctgtccagactgcgacacggtatctcttacaagctagctcggtgcataatctgctcgcgtcctcgccgactttcaccgcagctactgtgtcgacggtaccggagctcgagtctggtacgcagtctgctttgtcgtctctggccatggcggaggctacattactggctgtccttaaagatgatgcgtatgttgcggcgtgtatccaatcgcgcaatccgaatgataaagagtggatggtccgtgcacctgagataccgaaggtacgcgctctgctatttgcaagactatgtgttcgtgccgcagagtacgccgaacaagcggcggcaggtctaggtgcagttggatctacgtctggtcgtgcaggccgtgtggatgaggatttggtccgctataccggagtcttggctcgcgttgcccgagcacgcgcctgtcgattctttggtgtggatgcggagctatcaggcaaagtcggtgagggtattgcgtggttgcgagctgcacgcactccactgggcctacgtggagcagggtctcaggaagacactactgggtcaggaggctctgcaaagggtggactatcccgtttaaagcgagaatggacagagcggcgtgaggagcgtcgagttactaaggatgctggcggtagtcgcagcgacaaaggtccattggatgcgggagatgatgctggccgtgatgaggagggacgagtcctcgcgatgcttgagacgaattgggtgaaaatgaatgacacagtaagtttgaattctttacgtcactctagcccaagtgagacttaatatgtatgacttcctgacccgatgcagatgaacacgcagatcattccaccatctgcaccattgctctctaatctgccttctgggcgtgatatccactctcccccggcaccataccagcccccttctttagatgacgatcaactcatgcggatgcgtgccccaccagatgagagagatgacgttcaattcggaagtgacgacgatagtgaagacgatgcaggacaacctgatagtcgtggacctccgggtgcattcccggaccggagtgcgacagtctcgaccgtttattattgaatacggatatataagtacatataagtacatagcatgagatacggtgattataccgaagttagcatttacttggcggtccaaggacaacaggtgcccgctaaggatacattgggatatgaggccgtgtgtgggtctttactacgaccatgaacatcgtagaagaaaaaagaagatcaaacaaagtgatattatgtacagtacagtcggacaagagcatagagggtaatctccagacctcttctgccatcttttcgtctcccctccgacacggacccgatctaggtggctataagatcaagattggacaggatcggatcgaaaccacgagatttccgtccaaagctgatcatttcatctcgatatcaattgtagaatccccgcggtgtcgatatcaatcatcaaacccgagcctcgaaacgcaatcgcatagctcaacacacaaaagatgtaaacgcttattccggctgtccaccgaagcggttcttctccatgccgaggtaacccctaatcttgctttccttgaggagctcgaagtacttgtctgcaaaagatatataggtcagtacaacgcatcgcaatcaataccaatccaatccaatccgcatagcccacaatccagtcagatcagggtatttcgtagacaaatccagaacaccgaatctcctggatatagcctagacaggacacagaatacggaaacaacccacctcggtaaacaccacacttctcaaggtggttcacgccctcgcgcgcatagcacttgcccaattcctcgccgacgagacgcgccatcatgctgcggacccactgctcacggataatggcatcgcgggcgttgtggagtgcgacgttgtcctcgaagtcgacgccttcgtaggtcggggcgacagtgggcttcttggcgaggaaggcggcggactcggcggtgggcattgtgggtggttggtttatggggattgcgttgaggtggggttttgctggggttgttgcttgctcgggcgctgggcagtgacggcaagggttgggagagtgttctcttgaaagctgcttgatgcggtcgtcggcacgttgatcttgaaggttggattacgtgggttgtgattgggtggatggagggcggtcagggtggtgtggtgcgggagagggagaagaccttctgcgcagatctgaaggtcacgtgaatctatacaatctgcaaacggcaggacagagtgagcgaggtttggataagattgaatttttatgtggcttagaggaactaggcactattatgttcagtgaagaaatgacttgcgaaaatatcatattttcaatgaccgtggttgatcaagataatgcggcattactaaaacgatacatacatacaaaacaaaaactttaacacaagacctcctatgatgcgaggcatgaccacatggatgcaaacctgccgtggaatatatgtgatgtgaatggcataaaacagtaaggttcactcatccccatccacaaccttccccgtcatttggtcgtatagatcaactacactatctctcaatcgctcccaaccagaccggccaagccaattgctcagttcgcgatagtagtagatttccgaccagcaatcacgaccaaacatacacccagccatgttaacgacgaggtcgtgtgctgcctgctgatagtgaacgactggattctctccgtcgccgcatgcgccaggagggaaggaattgatgctgcgttgtggtaaaaagccaacaccgctccggacccatggttggctctgatatatgtactccagagcatcttgttctttgtgctcccattccatgtgcatctgctcgtacatgacgggatcccaccagacatcgagcagccgttcggtccaaagagaccgtcgcaggaagaaagatccgagattgaagccggagcagtcttgtgtcaggagcatattcaaagaatctgcctggccatcgccctcgcgagaacgaccgagctcatcgagccagaactcgggtagtggatgggtgatgttgatagggttataggcattgatatcacggtagacgtgtgacttgaggtcattgaatatatggtgttggagagatgtgtcgtactccatgacccaggtgttcaagtcgagccaccaaaaccactctgcgtctggatacttgcgcatggctttgcgaatcacatcgcctttctcccagctctcgcgccattcatgtgaatatcgcttcttggccagcaaattggccagctcgagctcgtagccccattttttcgcatatctcttcttgttccatatgctgttgcgctcaatggcccattcacgggcacccttccactccatgacgcctccctctacgttggatccgagtatgatgacgaacttgctcccgccgcctataggcgaccttcggtatgtttggacaatagctataatgcggtcagagtggcacgtcgaaatgatatggaattagcaatcacttactcgcccagcaaaacatatagccgatccacaccaagaacagcgccaataatagccggaaccgaccccggcgcactggtatgcgtaatgcgcctagcagaccacgcccactacccggacgattccattcccgaccataatcatccttgtcgacgtatccctgcgacgaaagtcttctcaagctaggaaatcgagcgaagatcttgtgtcgttgtcgagagaagaagccgctattgcgtgttgagaatgatggataccggtacacctcctcgctctttgccttggcttcagcccatgaaacgctgcctggtgtgcctggcagtaatgaaccggacgatggtttattcggcgatgtgctgccgctgcccggaacgagtcccgggctggaccaccccccgcccgcgtggggagagggcgaccgcgataaggtcatcgcaatgatcggcgccgaatagttgtgtgctagagatcgatcgctgtgaaatcttgaggccatcgaccggagagtaatttcgtaattgcgagcgaagggggttaattcgttgtgaggtcagagtgacagacaggacgagtgggatgaaattaggaaagaagagagttggcagttaagatacacaacacaattcaccgtggggacattatacaccggattcgagatgcgaggaacttgaggccgaatgcggcatgtctgtgctgattgcatggcattggagcaggtgcgggctgactttcggtgtttcccagcgttgaagttgggaaattgggttttgatctcgcgttagtgtcaatactcgtaaaccgaattattcccaggggtcaatgactcctgctgtatagttgacatacagtttaagtctaatttaacctacgagctactcaatcaagcggagatcaatttgcggagcgcggagatcggctccacattcctacatctactcgaccgcttgcggacaaagaccattgtggagtacagaaacaattaatatcatgcggaccacgcaattactatctatgaccaaagcggaaagactaataaaaccaaatctcaatctacttccgatccttgcattgggactgaatcggcattcgattcgccgtcctgtcggccttgctcatgagagcttgtcgcaccatgaaaccggcttcaggtccaggccggggctgggcgctctcgccatgggtaaattcgcactggagcttgaggaacttcgttctgtctttgttttggtacacagtgataatgtcgccggtgtagagcttcccgaattgtaaagcctcaggaccatcctcggtcatagagccgcggcgcaggagtgtatcattcacccagatgccaagacgcgctttggtggagagaatagccataaccccggggatatcgagccagctttcacctgttgcgatcctcgcctcgattcctggagtccaaaatgtgacctctagtgcataggcggggatcctagtgtccatggaatcagcatgcttgacggtcgcggacggcccgcgaccccaggaggtgagcctatcctcaaggtagattgtcaagtcgaatatcgaaccgggaaggctcttcagtttgccatatcgttttggtggtttggcaaactcggggtcatagagagtggaaggaatagggggtgagttgggtctatgaacaatcggttctgacgagtctgcttcctcgacacagacccgatccaagatagcttggcctgtctgcgcatcgagggtagtagcaaactcaacgtcgtattctgatttcgagggacgagaggggtagttgggagtagtgtcgcggtggctgttgtggtcactattatcgctagatgcctcgctggctgtgtcggggattgcaagagtgaggtcaatccgacgtgtgaacttcgctttgggggttgcctcctgtggactcgagacagattctgccttagggctcgaagtcggcggaagagaatcctttttcgggctactagatagtgtctcgcccttggtgtgtccaggaggggtctgccgcaaggaggatctgttaaccgggccacccttaagttgcggagtggggttcaaggaattcatgttgagttgcccaacgagtttctctgcacccatcaaactgggtgcagtgccaccgaagggtaccgccgggagggaaatgatcgactcgttgggatcgtcgctcatcatcgactcaccggaagagagaaagtcaacgtgaaaattattggcgttgaaggcctggatattgccgagtgcgtgggagctccgtagagccgagggggtaatttcgccaaacaaacgtttggcactattgtccactaccgcttgtccatcttggaagctctcaatatttggaaggctgggatagtgtacatcagtcggaatgtactgggtacgggggcgtttggagattgcttcgctgccgctactctcctcgccgtcggcttcatggacgtagcccggaccgtcagcgatagacaactgtgaagcgtctagctcgtcctcgggatcctcgccaatgattgaaagccgatcttgataatcatatagcaagtcgtcatcatcctcatactcatccacatcaggcacctcggagatccaagggtgctggaaacacttcttctctgtcgggcgtgagaaaggatcgcgattgagaagctgggcgacgaaatcgattccagcctcagacacgcctgccgtgcgtaatgcatcgaaatcagcgtcgcttgtcatgatggtgcgaagcatctggagacctcgatcttctgcacgccctgagaatgggggaacgccggcgaggatatggaaaaggactgctcctagcgaccacatgtcaacggattggctgtatggggatgttctggggggtcttttaacgtcagcagaggcttctcaagcgaaaggaaataagtgacttacgggtctccaacgcgacgcctctttcggagctcgccacggcggtattgatcataatctgggtaaacttccggcgcgcagtatagaagcgttccacaaaaagtttttaggaaagtctcctgctccaccactttcgacagcccaaagtccgatagcttaattctgagcgggtccaacgaggcaatcaggatgttgtccggtttgatatctcgatgggtgatgtggcgtttatgcaaatagtgaagcgctcgcaacacttgtcgtgcgatcgttctaaccatttcctcgggaattctctcctgcgtgtgcaggtatgtcgacagctcgccgcctggaacatactccatgatgatgtagatccatcgatcatgctcgtgatgatcgatgtattgaacaatattcggctgcaacacgttagttctatagttaacatgcaatcttaaacatattgcttacatgtctgagatctctcatgatcttcatctcattgtcgaccttctgatcaaggataccgtttttcatgaagcgacgcttgtcgagttctttcgcagcatagatggcgccatgttgtttggttgcgatcttgtacacagtagcaaaggcgccctttccaatctgtccagtcacgttgtacatggcaccaccggtccaatgcatgccataagcgttggcggatgaccacgctagagcagacgggcttgggccctgtcgctctttatgggccggagcatgtgcatgaactcgttcgaaatagcgaaacaagttctggtgatagtggactgcgaatccttctcgtaatgggattcgaaccacgaaccggacctcgtcggagttttggcagccggtaacaacttgaatgacagatccattcgtgagcattcgactattcccatccttctgagattttcgtaggcggcaattgtccacaatggtaccatttgtcgacgtatcttgcagcatgagaatgccgtcctcggtaagatatatgcgaaaatggttatttgacactcgtttggcattatcatcgacactcagaagaatatcacaacgagaccgattgcgaccgaagcaaaatcccagtcccaggttatgaacttttgacgagagcctcaacgccaaatctaatgatgcagtgtgagaggagtcgtgccctagtatgtccctttggaggatatgttgaggacatattccgccagtggcactgacagcatcatgggcagcatgcgaattcggatgaaggatacagataatgtcggccaggtcttgatcttggatgccggagttattcattcccattcggcgaggatcagcacatggctgcgtggattcctgggtggcttccattatgagggtgaatgcaagtgtaaatgaaggtgctaggggaatgaacacagaaatgagctacgggtacggatccgatggagtagggtatatgtgctgcgctgccagcaaggggaatgtgcataaaaaggtcattaaaatgtcgtagactagatatatgatgtgtcagtggttttgcgccaacagcgaaagctcggagagggtttgtatatacctcgagggaatgaatgctagggccggggagccgcacacccgggcaaaagttggacaagacaatgaatgatatgtacgcttcaggaccaatgatacaatcaccagggtatgtgtcgcctcagcaacagattgcccacgaacgttttgcttggtgatcgcaaggagtggaaataggcaatcagatgagcatgagcgataagtgaaccgtgtgccttgcagagtggggagtccctcttcagctcttctcgaagctagcgttgatcaacacagatgatgaatgatgcacatgagacaaaagcgagacttcaagccctcgtctgcatgtcataagaatacgaatcttgattatggggttgcagatgtcgaccggcgcagaccgtcaaatgccgtttaatgagaagctaccgaatgctgtttccgtattaaatgctcgaattagggattttaagcgtcgattttgagagggccaggaggtatgtctgtggaatccagttttaacaagttagcaaacgtcctttagaagcttgaagaggcatttgtttagccccgactcgagatcgagaatgaacgcacacagcctgaaatatccccgatcaatctgtccgcgggtagcaaaattgggacagtagatagataaaaacggggacgccgggacagagcaaaattgcactcctgggaaggtcgtcgtccgaggaacaagaccaggaacgagccgcaacaatcgtgactcggtacctgaggcaacgacgcgttcctaaggcgcgtaaccccttactcatcaggcaacagagccgttgattggccgagtatgtgagaggggttaaccactcaagttcgatctatgaaatacagtgtacacgataccattatgaagtatggctatagattcgttattatttacgtcaaactatttacttccatacggcttgctagtgtcttcactccgtttgaaatcacccttcagcgcagtgtcgaacacttgctccagccgtgcgagcgcttcgtccgatacctctgtgacaggtcagattttcagtcatgcatgctcagccctgaagcagactacccaggtaaggaaccacttacggtaatggaccacaacgcggccacccaacaatctcagccctttctgctgtccaatctctgccaagtcattcggccccactcctgatgcttcgagatccaaccaaaccatattggtgtgcagggggtactctagcttgccaccgcgactggtccacagatcggctacccgtttcgcctttgtatgggttgctgcaagcttcccggtctggccgttggggtccgtgccaaaagtttcgctgagcgcaacgcgggcggcagctgcaatcacgccagtctgtcgagcgccgccgccgatagatttgcggaaccagcgcgctttcttgataaactctcgggagccgacaatgatacttccaataggtgcccccagccccttcgagaagcaaagactaacgctatcgaagatgcttgcatattcaggcaagctcccagcaccggccgcgacggcttcccacagccgagcaccgtccaagtgaaccttgatgtcattagcatgagcccattccacgatccgcttcgcctcagccagcggcatgatcatcccatcgagagtattctctagactgatcaacttggtggggcaataatgaatattatcaccgagaactgcgtgctttttgacgtcttccaaagtcaaatgcaccccattcttaggaatgacagtgctcacggtggcgccagtccaagcactcacaccaccagcctcataacagatgatatgtgatcgatgatcacacaatactgaatgaggtggctgcgcgagatgcgagcgaatggctacctggtttcccatggtacccgaaagaaccaatagactgtcttcatgtttggtaaaatcagccacgtagctttgcagctcgttggtgactggatcctcgttgaagacatcatccagaagagttgtctggcagatcgcttcgagcatcgacgctgtaggcttcgtcattgtatcgcctgaccaaaatcagcttcaattctgtcatccttttccgatttagtcatacttcggaggtcgaactcagcggctccagccccatgccaggctgtagtcttcttatcactgctaccaatgaccgccgaggcacgagccagggcatccgttgagagttgtgccatagcaattggaaagatttttcgaccgtgcggggctgtcaatcgaaacgccgaggaagagcaacggatcggatgtaacaagcgattcatggatgagctttatgacagtaaccgcagatacctgttgagggaattgggaaagaggggagtcgccacgtgatccggagacagatagctcgctacattgtggaaccgggatggatctcatcctcatctgtacagcatgttgcagcggtggtcggagggtaattatattcataagcccggtgctgatacaacctgaaccttgcgttccatccatcagaagtgtacaatctgtagctccatgcctccgcggctatgacgacaccgttcttacacagtccttatcgataccccaattcggcctagtgcatccaacggtcggcctcgaccgctgactcagcaatgtgcttggttgcgggcaatgcgcttgactggttcaagtccgcacaatcttacaagactctgattgcttacactaggcactgcttacactgggcacaatgatggacctatcccatctcacacggcctggcattctgtgccagtgtgctcgatgttccagctcactggctgcactggagaatgagtgggccaaactatctaatgcctactcaatcccgacagcatggctgagtgtcgacctccatcgcatcgcggtttcttcggagcggaagcaaatccctcatacatcggatatgacccttctgcgtggccgtgtcattcaagaagtgtcatgtaaactctgccagcaaaggatgggggtactttgtccacttgacaacgggtaagtggctgtcgatcaagaccggggcttctcatagctaatcttcttttaggatgaatattttgtggaaaatgtcgaaagttgcttttagggagattgttaccatgcgaacggtgcagcctgtattcaaacagggggccctcgaacgactgatttgtcccccgaaagaacctccgcgccgaaacaccgatcttgtccagggaaatgcagtggtcccagctggctccaccgatcccactaccgtcgatccagcgatgcaaaaacaaatgatccaccagggtagaagtatcgatcagatttcgaactcagtgaaccacctccaagatacaatgtctgatctcaaaaactcatttacagcccttcgaattgagttgaatcgacccggacggaatttggcggaaggttccatacttcaggggcaagactttgacatgattgctatggtgctcaaggagctcaaatccaagtctgacgagatcgagaaactcaagctggagatcgaggccctgaaactgaagaatcgctatatgggagtgaccctgccacaccagcaagagtcattgtcgatcatgaacatgaatgctgcgcttcctgaagtccggagccccggcttactccaagcgggccggaaacgcaattggcctgacgcattctcgggcgatcgcagccagacaatcgcggattccccggaggaagatgatatggtggatgaaatgtctctatcagatccgctgataaagagctctcgcattcctctcaatgaccaaccccaaccagcaattatcaatggtccacctggtgaagagcaaccggagtccctagaggggctgatgtctgctcgagaacctgaaaatatctccatccctcttcaaccccaatccagcttgcagcaaactatagccaaacgtccgcgcctaggtgtgcctttcgaggaaagcccccaaacggcccctccgcagccgcaaactgttcctcagaaaagaccgcctggcaggccgaggaaatcaatcagccagcccactatccccgatctcaccgaatcacccagtatcgctccttctaccacgcaggggaatgtggagtcaaacgttcaacaaaacacagtacgacgtcgcacgtctcgtcgcagcttgcgtgcgcaatcccttggtccaaataacagccatgcacatagtgaagaggaccagcagaagacacaagagtcaactgaagctccccctgaggctcacccagcgcccaacaaaaagaccaagcggaatactggctcccccaatggaaagcgaactggcggtccagacgaggacggagatgaggccgctatgaatgagaagcggaaggctaaggtcgcggcgcgggacgtcatggccaagatggctttacagcacgaggaggctttggaggctgagaatgcatgataaatcgccagcacttatcactcacagacttgtacattagacaataaaccacacataacgtatcatgaccaaagcttcaactgagaccggctgataataaagtctgtgcgcgccctcgtatacacctagaacggctcttatataaagccctagtaaattggaccaagtatctagctcacttcttcctactctgattgagagatcaacgtgataaactttcttgttcaaagccacagtatatcagtaaagtcgaaacttggatttgctaacctatgcggatatcccctaacgcagtatcatatcataacctcataaaaatcattattttcagtctgtgatgtcccagagaatcttgcgagtgtcactagcgagtcgggataaagtgcttggaactggcctcttgttcgctgaatgactcagggaatgctgcgataccaccaatgatgccaatagccatgaaagcaagagagatgagagaccagatgactccccagcactgggaagatccaccgtatctcttagcaaagacgctggcatcggagctgtttactttgcgaaggatgagatcgtcgcactggagcacatcttgttagccacataagtcaattgagtgcaactggtacttacaatatcccagacactgtacaatgcagacatgacaccaatgaacagctatagagaaaagcaggttagttcaagttcatgacgggtgaatcataggacaacataccacgacccagcgcaaggcttcaccgtggacaatgaaccagcatgccaccaacaatccgaccgcgagaagaatagttacgatagtcaaccagtctctccgcgcccaccaaagggtaagcagaaagcatacaccgaggacgaaactagcaaccttgcttgcgacaatatcaaatccagcgaagatcaacagagccccgataatcgaagaccccaggtacccagcaggcaaagtgatggcactcataccgccttgcatatgggtaacgccgccttcatttggatccagcgagatagacttgacttttccaccagtacagcaggcagtaatcgcatggccgaattcatggaaggcaatcaccagcatctgtgcagtaggttagtcacagtccgtcaatatggggctgggagtatttaccttgaacggccatagtacccagcggacatatggtagattccatagtagtgcgatgaccaccacatacactgccattatccccaaggtgacggcttgggtatggttgacacttaagccacgccgggccagttggtgcggggccgtttcgaccgcgctttgggctagcgctgcatatagggctggcatggtgagcgataaacaggctccgtaaatgagaaagagggagatgcagatgttgaaatgacggaggaagcgtaagtgcagaatatttaatggtcagctaatattcgagagatcatccgcgcgtccatagggccgcgcatgccagcagccacttgttttgttttgtggctgatctcccttgggctatttttagtggcttggccttttaggctgaagggtttcacctttacgtcttcagtctatcaacatattgaaatgatattcattacaattagcatacattcaattcgctatgttctttaatccatatgggagatgatttaactgaaaatcaatacgagagggttgcacctgccatctgagttaggttatatatagtgaggttgtgaggaagtcacgtttgacaagctaaatgtttctgaataggcaatatattattcgctgctctttatccattcaccattcattcaatctcaaccgctaatcccacagacagaatgagttgtctaggacgcagaacattgagatggtggttcacgatgttgagtcttcgacggcagtcccccggctcgcggcatcgagaccgtctccgagaagagctatgcgagcgtcgacatgcagagacaagttggcaaaagcttagtgagacatcagatgtcattttttcaatcacccgggcccaatacgacgggtttccaacacggaatccttcttgcttgtacagcctccatctcagcccgatctacatgtacatggttgcaaagtacacgtcacgatggtccttcttcgaagcagccgccctcttctgcaatgcccggcactggaatcttgtgcatgaggtcgtgaacccaagcaaggatcacaaactcatagaagtcgctacccgccatgacattgaccaaacggagttccagcgggtgagccgtcagcttaggcgtatttggccactgcttccatgaatcacaagtcatgattccggaatagtccatagcgtagctgtatgtttgctgcttagattatgtgacatacgttacgagtcaattcactttctccgtttctctttgcccctcgataacaggctcagctttaattcacctcagaaaaggtttttatcattaaagcttactggatcaggtctgaccttcccttttaagtaccacattttcccatctacgataaagttcaatcttccttgaccgctcaccttcaccagttccgtatccacgatggaaccgcacgaagaagtgaactgtgatgaccgttcccacccatctcctcgagctcagcctaccagttttaagccggtaattattggtttgtatggcctccctgggtctggaaagtctttccgactggaaggactcaaaacggtactggacaatgacaaatttgcgttctatgatggcagcaatgttatcgcagcggtgactcctgggggtcttgaagcattccagattttgaccaaagagggtaaaaatgatgcccgcgagcgtgctatagccagagtcaagcaggaatgttccaacacggggaaaagtgctatagtggctgggcatttcatgttctgggccgaggaagatgagcagggccagtcagtttgtacaccgagcgatctgactacgtatactcatatcctatacctaaactccccagctgagctcatcgcggagtatcgttcgaatgatgttaaacggtgccgccagactgtgtcaacctctcatctggccaggtggcaggaaatcgagcaaagccacctctgtcaactttgcagatgccacgatatcctgttcacgctagtgtcgccactagtatccgccaacaagctcggttccattgttgaggattttcggatgcatacggaggactacaacatgtatctcgccaaccaaagaatggaagacatactcgcttcctcctccacggcggaaactgtcatcatgatggatgcagacaagacgttggcgtcggaagatagcggagttcttttctgggagcaggtccgcagtgcttcagctaagcgcaaccccttaaaagctttgttcagtagtccactaggatattcgtacactgcatttcgccaggcaacactgctgtatgaagaggctcttgatgatgtggagtttgaggcctgttgccagactgtttcatcaatgatacacatgcacattgatattattgatctcttctacttgattcgcgatgcgagtcatgtacgtgtggtcgtggttacctgtgggatccgatctgcttgggaaaaggtgctgaagggaaggggtctcacggtaatgggtgatattcgtagtgaccgcacgagtgggtggtatgatgaatggccgacgcacttgactgaatgctggagatagacaagttgcttccagtgtgtccatgctggtgctgcatagcggtggtaggatagggaatgatgagtagctgagtgataggccatgcagtgggtgatgtcaagaatgggatatggcccctctaggtcctaaacaagaaccttggtttttgttatggtctagtggtaaattacgctgcacgaatttcgtcaggtgacaattgtggagtgctagaggcctcattcgatcaggataccgggtgttgctctcgcacagtgacaataatgactttaatattgagctagagcggttagacacatgccagttggtctggaaggctgtattgagtacccacctgatattgactcaactcaagcgaagcgaacttcactctactcttggcgattcgtgataggtaggaattgccgtgtaaagttaaacttccactgcaattttataattaaacagtgtcaccgtccgtctctgcagcaaagtatgttgtggatagccgggaagttgatcgagagaatatttagccgagtttctcaacaataaaagcaagagatatgtaagagcatcccaatgaggtcttgggacaattgagtctcaaagacgcattaggaaccgtccatgaaatcttcatttctcttcatttccccgaccaaacaagcgtttcggtcttgacaaaatccccaaagaaatgtccggaacgatgtcattcgcatcagtgatagcgtgggtgcctgccaatctcatggaagaaatattcgggagtgttcaggtacgttcgacactgggacatataagctgcgcaagaatctgtcacagaggtagctcattgatgactctgtatataactcgttcccatcgtggatagccacctagttaatggggactagttggaaagggtcaaaggtgtctttgggacttgaaactcactgggagatattccacacagagcctccttctccagcacctggcggactcatgtccccttcggatggtactgagctgcgccctacgcaacaggctagatgcgtcgttgtgtactgaggttgaagtaccgagactacgcctcaaatgtgccaaggcatgaacaagcctgctttgtacaagctccatgctcgggaatgttgaatagtcatcagccgagagtgtatgtggaagacacagagttgttggagcgaaaagcgagtggggctctgcttttgtggtctcggcccgcgccccactcatatccatggttccccaggttacggatgacgcaggacgtgaataataatgcctttttgaatgttcgatgtcgatgttatattaatgagacctgggtatatataaagggggttacagaggaccattttatgaatagccagggatatcgctgtcaacaaagtggctggattggttcctgaaacaaagtgaggaatgttgctaccagcttccagtgaaccccgcattcaggagattgggatcatcaactcctcagatcgtcaaagtgggatccatgtaatgtacggacatttgcctcccaccaacgttctacatcaccatgctcggcatgctccctgtcctcctagcgggacttgtaggaggtgcaaactcccagccaaagacagacacaacctatcacaaggatgctggtgtcctcgaatttgtcaaccctctcatcggaacctacggaacaacaccgaatggcaatggcggcatgatcccctccatcagcccgcctttcggaatgacccgctggacaccgcagactcgcgagaacttcatctcgcaagtaccctacggcgatagcgaccgcctcattcatggattccaagccacacatcagccggctatctggatgggtgaggcgggtcaggttgtgttgacaccggggatcggtgaagtgcagccgttgtttcagaacaggggattgcagttccgaaaaaaggatgagaggagtacgccgtacgtctatgaggtacttgttgatgctgctcagctcttgggtcatggttggaatgcgacggctgaggctgtaggtgatgggcctgttcccggtggtgcgggttccgtgccggatgaggtcaaggagggtgccaatgggcggacgcgaaaaagacaaattgagtatgtcctgcctagtagagatggtaatcagtataggcagtcgattcaggtatttccactttttttgggatcgccatgaatgctttctgacgattccagattgccatgtccgcagattcccatgttggtcatcttcgatttgacttccaacacagtcctaccaatcaagatgaaaaatgccagccgtgggtatatattcaagcttcgcgtcggaactggacaggcgaaatccatattgatgcgaacagtcgggaggtctacggctataacactgagcgtcaggattacctcctcggaccagacaaagcagcgtcattcaaaggatattttgtagctcgcttttctgagccatttattgaatttggcgtggcagatggagggttacttataaaggatgaggctcagcgacacgggaatttcacgggtgcatatgtgaaatttgctaactcgacatcgcgtgtcgaagtgcgcaccggagtttcgtatataagcattgcacaagcaaggaggaatctcgtgatacagactccagatgagcacaccttcgaggataccgttgaaaaagtcaaatcagcctggcttgagaagttgggtagggtatccatcaagggcatcaacaagaccgatgcggaccacgaccctcgcactatctggtataccggcctgttccatgctctccaatatccaagcgacttctcagagccaacatcgaagcacgaagatgcttcccgcgttttctactcgggatataccgatagtgtccacatcgagaacgactcatactatcagtcctggtcaatctgggatacatacagagccgaacactctctcttaactatatttgcgccggagcgcgtcaatagcatgatgcgatccttgttacgcatcttcgattggtccggttggctgccgatgtgggccaacttggtcgagacgaatatcatgatcgcaacgaatgcagatgtcgtgcttgccaacgctctggagcgagggtttaggggcttcaatattgccaaagcttgggaagcggtcaaaaaggatgcatatactccgcctgacaacgatactgatactctgtactatgaccgtgagccggccacatcatatgaggcccgcgctggactcacatcatacatgaaacagggctgggtgtctaatgatggctggtctgaagccggtagccgcacattagactacgcatttaatgattacgcctgttccattgttgcttcctatgcgggagaggacaacgccaccgtgcaagccctcaagaaacgaagtggaaattatgcctatctttggaataaagagactcaatttatgcaagcgcgcaacgcaaacgagacttgggctaatagcacttttggatggaccgaaggcgatgactgggtctacacgtttgatgtgatgcatgacgtgaaaggactggctgagatttttggtggccgtcaagccttccgcgataagttggatgcgcatttccagggtggtcacaatgaccacacgaacgaaccaagccaccacgtaccatatttgtattcagctcttggttatcccaaccaagcagctgagatagtcaggagcattgcttgggagaactacaacgcgaccagcgggggcttgggcggaaatgaagacttgggacagatgagtgcttggtatgtcttctccgcattggggttttatcccgtcaaccccgctagtgatgagtatatcgtcggtacaccattatttgagcaagtgtccattcgtcttcctagtggagcgagcactggcggagaagttgccaatgggaaagagaggaggcttgaaattagtgccccggaggcgtccacgaagccgtatattgttagtctgaaaattgatgggaagagtatcaataccccgatcctgaagcacagtcagattgtgaaggcggcaagaatcgactttgagatgagtgctacacccacttcatggggaagtcgccccatatgggaaacttgataccaggagaacatctaaagtccccggaaaatgaggacaacactagctgtgtccatcatgtgtttagacgtttccaccaattgaaagtcgattatattttcgtagatcttgtccgggactctgttgtggtgcctttttccaaggtcgactttttaatcgacttgatcttcatcgcctcaaattcccctgctccatcttcgatatacccatgtcgttttgtgttttactcattggagctgacaatgagttccaccgcccctcattgattttcttatcacctcattctcgaggtctgttgcaaagtattgcgccatagtacatgccacctcgcaatgaacacacaatttcttggccgcggatagagttcaactcgactctctaactggtcgcaaattaatccttggctttgtttatgacctggtgatggtatatccccatgcctgctggagtttatcatgcacggcttgaacaaggattagaccgcgtatcaaggcaatacttgacgaagctagaatctaacatgaacgccacaagagctaaaattccattggcatattccgtcttatcacatcattatagtagtttctgatgacgcctgccgcacccctgaccgcgccccagttattgtaggggtccgagttgtacagtagtatatgtacatgcgaagtcgcgccatgtgtccacgtaagatcaaagaattctctccagccttcccttctgccttccgaaatgggtcttccatctcccgtacgggaatataccgagtcggtccctcaatatgagaccagcgacagtgatagcctacagtataccaccgaggtcggtgggaacacctccaaggccacataccaggaggcctcgggagcgcccgttgaggttaattccccgctggggtattcggtcggttgggttacagtggttttcctgaatttgagtaagatgatcggaacgggagtcttctcaacgcgtgcgtacaacccaactttctctggattatttgatatactcacatagaatagcgtcgaccgtcctcaaaggcgccggctcggttggtctcacgttgttttattgggttattgggtatttgatggcctctagctcgctatcggtctacatggaattcgcatcgtctttccccagtcggtccggctcggaggttgtctacttggaacaagcgtatccccgacccaagtactttttccctactgtgtttgcgatgcagacggtgcttttctcgtttagcagcagcaatgccgttggtatgattacatcgcgggtgaatggtggagtgacgtgtactgactttgtctagtactggcccagtatctcttcaaacttgcgaattcggacttcaccccatggaaattgaagggagtcgctgtggcttgctatactgttgcagtactgggtgagtggtactccttttatctgtatcacatgtgctgatgaagtcgccatagttctggcatttcacaccagatggtctttgcgactggcaaatgcaatcgggctagtcaaactgctgacattggtattgtaagtgttgatccacaatatactcaactcaaccggtaaagctaactggcacttagcattgcgataactggcttggtggttctcggaggtcatacctcagtgaaagatccaaaagcaaattttaggtctgcctttgagggcagtaatgccgcgacagcctacggagcaaccaatgcattgaccaaggtctggttctcttttgcaggctatgagaatgcgttcaatgtcgtcaatgaagtcaaggtatgtacttcacatgatcatgaccacttgtttgctaacaagcactagaatcctaccaaaaccttgaagtggagtgcgccgctctcgctgggggtgacggcaattctgtacgtgctggccaacattgcctactttagtgctgcaagcaaggaagaaattctagaatcgaaggtcgtcgcggctggtgtctttttcgagaaggtattcggaactggtggtgcggcatccgctttgaatttccttatctgtgtgagcgcttttggaaacctgcttgccgtgcttcttggacagtctcgcatgctgagggagtgtggaaggtcagtgatgaaacagaatttacttttggaagggaacctaatgagttgtttggatatagacaaggtgttttgccattcacttctttttggacgtcgacgagaccgtttggaacaccgctcggtccatactttgtgaaatgggcattcaccgtgttgatgatcctagcaccgcctgctggtgatgccttcaatttcggtacgcccttttctattatctgaccttctagttgatcatttctccagaaattgaaagacagtttgctaattttggggaatagtggtggatctcggagtctacgccacgacaatctttggtctgctactcacaataggcctggtgatcattcgagctcgtcgtgcacgcctcaacctgccaaaacctgaatacaacgcctggcacgtttcagtggcatttgcaattctttcgaatctgtacatggtcgtaatgccatggtacccgcccagtactggggcgaatggaggcgatgtgagcttctggtatgcaacatattgtgcggttgctcttggaatgtaagttgttcctattccaggttgtccctgtcggtatagatcactgacgtcaaagaattaaaacagtgtcggtctgtgtggagtctactattatgtctggatcaagcttctgcctcgaatccagggattcaagtgggagcaaacggttctcaaactggataatggtgccctggcgcatcggcttgtcagggtgcccaagaaggatacctgagatatgtcattaggtaacctaataagagatgcaactcttggtatattacccaactactccgtacatttatatcattaccctttcgcccttacgataccattttagcgtctaagacgtgatctcatattggacgccaagcctgtgcgggactccacttcccccggggccgacccgttccttttccagctgtaatcatatctacacctcgcaggatgcacgacggaaggaattgaattaacttctcaaggagctgagattgatacaatctgcagattctatctcaccacggggttatgggctgaagatggcaagcgaagtggtaccatgcgatgaaccgatgggctgtcggctagggagcctatttctccgtgagcttttgaggctgttcatcattagacaaatggatggcactacaacatacgatcaagactctgttgctaaggttgttaagggcgtagcaaactgcaccttccaaaacttagttggttcgttctcggggtcaaatgcctgaatgctttgtttgagcgtttatctttgcctggtttcagaccgctttcaggctgtatcgtgtactacgtattggaaaccgggcgggaataactaactatgctctagagtgcacgataggctgtttgtaactgtaattcgggtatctttattttctgcccgccagaaataaggcattcatgcgtcaaattcaggcaagcagctttgagcgctataacgtaatccactaccgagctggccacaccaccgagctggccaccccacccaaaacgcgtccatgaattagcacttaatgaattcaaccacccaccatgccactaattcgctctcaaagctctcgaaattcaatagagcaagaaggcaggatcttattagctatccaggctattaagaaccgagaaattagttctattcgggaagcagcacgcatcttcgcagtaccgagatcgacccttaccacgcgcctccggggcgtacaaaaccgcgcgatttctcggcctaactcacataaattgatagaaatcgaagaggaatcgcttataaaatggataatatctatggattctcgcggatcagcccctcggccctctactattcgagaaatggcgaatcttttactcaaattgtacggaataaccccggttctttcagtcggcgagaattaggttataaagtttgtaaaaaggtatcccaaactcttaagccgattctcaagacactataactataaacacgtaaagtacgaagacccgaaaactattagggagtggttttatcttatttaaaaaactatcctttaatatggtattgatcccgacgatatttataactttaataagactggttttgtaataggattaactgtaaccgcgagggttattataagggctgaatattacagttaccgatcgcttttataacctagaaatcgcgagtaggtgactgtaattaagtatataaatacttcaggatagatattccctctatatatgatttttaaaggtaaagtctttattaaatcttggtttaatagcctccctaacgattagcaatttaaagttagtctaaacagatggacctctaataaaattagacttcgatagcttaaaaagctctttattccgttaacttctttatagacaaaggggagatatcgacttctaatacttaacggccacagaagtcatttaaccctaaagtttaacaaaatttgtgaaaaaaataatattattctaatctatatacctccgcacttatcttaccttttacagccacttgatatcggttattttgcagtattaaaacgcttatatagtcagatagttaaaacgaaaatacagagtaggataaattatatcgataaacttgatttcctcgaagcttacccatctgcctaaatcgaggcctttaaagaggatactattaaaaatagcttcggagcagctggtttagtaccttttaaacctgatcgagtgattttaaagcttaatattcgccttcgaactccgaccccccttttgagctaagagaacgagtaggagctaaaaacaccttcgaactataaacaattgctaaagcaagcttcctcaattaaagcattgctttgtacaaggtctcgaagccctccgagcccgcttaattctgcgataaaccaggttttaaaagcctattaagttacaatacaatcggctgcttttctcaagaaagaagtaagcaatttacgggctataaacgagaagcagaagcaaaagcgcactcgatctagaaagcagataccttctaccgagggcctctcggttttagaagcatcgacattaattgtacagccagaggaagcaattaaactacctccccctcctcagccaagaaggccttcgccacctttattaccctgaacgagagtgttaaataggtgcagagcatgtggaaatctcgggcataaaagaaatgcatgtccagatagacctagatagatagttttattaatttatggcgttttggttgagatatattgatttaaaattcagaggttggttttggtggccagctcggtggtgtggccagctcggtagtggattacgttatttagactttcccatcaccatttccccatctgatacatcccaacgaggccaatttcatcgtgagttttatttctatctttacacgcttctaatagctaacatctacacttggactaggcactctctgcgtggaccctacaagcaaagtcaagactctcatctatttaccctcatctaccaccaagatgccatccagtgacgcacttcgtatatacccccccttctgcattccaacacaaattgttatctatggctgactttaactggaacagaaccgcctcttacgcccgctgagcgggcaattgtcaaatcctacggcggctggacacgcttcatgcaaagctacgggctcaagccttgggaagatgatgatgccgaggagggaaagaaaatcctggaggcccttgctctacatgaggaagcttccgaatgagacgggtctagccggtgtttggctacaacagaaggatgcatcaccttgattttgccttggactgatggatgtcgaccatacgttctccgcaccctccttcggactttcgattagattcaatcaagtattttcttccagtgcttgcattgctggtacactgtgctttttgggatttatgaatggtagagcaatttttcgaatgcaaaaggctgtcaggtattacattagatgggcgcacgcgatccatttgacaatttcaatttgctctgcgaaaacatagaagaatgtcacataaatcaacaacgcaccaatccaactccaacaaaaccgaaaccgagaccgaaaccgaaacctaacctagtttgaccaaaaaccaattcataacccaacaccaccttgccgatagaaagaaggtccgtaacctactcggtttctcccgctggattaccggcaaaccacatcgcaaatgcttcaaatacctctgccgtagttttcctctcagacaggtgataaagatcagaagagcgtagaataaggctttcaccatcaaaataggactccagcatacgtgcatgctcgcccatgaacgaggcgaccaaaacctgtagagtacctagttagtaatctatgaaagtaagaaagtgaaaggagggggtatagacttaccggtgccactttatggtggagtaaccgcaccatcctgaactggcagatcattaggcggaggataatcaatagctcgccacggcagagcttgctatcatccaccagtaagccgctgtgtgcgattactttaatatgtggggctgctgccccggggatgtccatgatccacgaaacgccaaactagggcttgtcacacttgtacaacgacttgaaagcatggtacttgcaaacactagggagtagaatagcgttagaaacaatggggtgatatgataatatatctcagaatagtaatggatgacacttacggctttgaacgccatacgcggtcattacactcccatcgtacctctagaccataatgtcgccacactctttcgaagtgatatgatctagagattgtgtcttcaaaaaggccttccacatcgaccgcttcatcgatcacttcatcggtaggttgtgggatgttagatatcgccgcgaagtaacggggcttgaggtccgagtcttccctaagactcatatgctcgcgcttgatgttcaacttggcgagttgcgacgcgtcaaattcatgaacctcaagagcttcgatgtcatcatggagcttgactagagccagacggtgggcgaaatggacttttgattcccgagaagttggctttgaagacatctttggtagtgttgtggtaatgatggcttgtagagttgtagaaatttggaagagtgtaactgggggggacacgctaagaggaagctgatcggactaaccctaaagagatgttactcccagtatggaccgtgggatactacagaggggggtcatatgcgtgtgttggggccgattttgttagcaattgccttgcgagctgaacaggagggcaaggaagaggagagcgaaaattaggagagcgaagacgaggagagccgagcctcatatgatgtactgttttgtggactgcgttgatttcaatcatgtctttcgtgtttttgatcttttcttgatatgtctcgatttgtttttgttcagaatggtctattatgttttggaattcatgcgcgtctttgtccataaagatatcaatttgtgtattcaagaattgtaccatcgctatcgtatagtgtatgatccaagtcaggagttaattaacagtcacgagggcttatccatgaagtattacttaatgcccaggtggcaatcctgcgtacggtataattccgaatgaagcatatcaaaccatatctatgagatatttaagtcgcccttattctaggatttcaattcgaatatgactacaaataagtgttcagcaaatattctagggctcccttattcctctttagtgcgactctacatagtggcactaccttatattgcccatggcttcgaacgcagtgatagtgtgtgcgatagagagagagatttcttttggattcttcctgtcggcatccagcacgaaatgtcatatactgtgaatttcaaagcaaatatgaagcaaccttcttatcatccgtccgtaacattatcattacactgtcgtgccatgtattcaaatatcccagatgtccttgtgtatctgtaaatcctgaatcccgctaataagctatgtaaattgcaatcagatagtatccttaatgggatccttttcagcatcttcaatctttttcaaaaattcctctgccgccttagcatcgccagggaatatattctcggcaatcattctgcgaggtgagctaccaagccattggaacagtgagaaatcctggaatcgatctgcccggaaaatttccaaaacctccagcggttcatcgtcactcaggttctcaacgaagtgtcccatattccgaggcacgatgccgacatcaccggccatgtagttgaacgttctggcgtttccttctgcggcaaatatcgtaactcgcgcacgacctttcttgtaatatgtccattcgtcggcgttggggtgccagtgcatctcgcgtagtgcgcccggtgcaatctctagatgggcggctgctactgttttggaaaccgggaagttcgtggagtcggtaatacggacacgaccgccgctggttttaatgggttcttgggcgagcatatgatgtgtgaagttaatctttgacttcttgaaggtgcgtggtttctcctcgtcaatgcttcccgggtttgagccttggaatatgtacttctcggatttcgggatgttgtcaaattgctccggtgacatccggaagttctctcctagaactgctttgggagtgtgagctagggaaatgggtcagtatttgtaaactatatattttgagacatggacagattcatacccaaccaatcagtcaagatgaaggtggactcttcggagaagttgccatcgtcaaagatcaacaggaattctgtcccattttcgcccagaccctggagcgaatgcggatgtccagcggggaaataccacagatctccttcctccaagtcgtccataaaagtaccgccttctaagtctagggctgtgactcgtacttttccagcaagcacatacgcccattcagcttccgtgtgccaatgcagttcgcgaattaccccttgatccagacgcatgttcacaccggcgagttcacggctagtgggtagctcgtggatagttgtttgtcgcgtccatccgccttcctatacgtacacgtctaggttaatgacgtacgtgacatattagaatgaccatacctcgatgcgaatatgtgagtctgcaaaactccatcgcatattaggcatattgccatggtcggtactcggcggacggacaagatcggggttctggcgctcgcgatcccgattccgcggtcccatgaccgtagtaccatctccattgcggaacggcagtggatgtcggtcatcgccaacagagtcaaccttgtgatcatatgggtcgcgatgtcctggggagaaaggtgggttttttccaataggctgttgaccgaataatgctgcggaatggccggctgggacctgcagtagcttctgcaggctgtgatcaggtgcagggatagcccatacagcctgaagatatgccaggtttaacaagaagcgtgtaatttgcatggtgggctttaaaattaataaattagacagaggaagagaagaaattcccagaagatcaagtgtaaactccggaaatgttgttctccgcatcgacgtcacgacattgcgcatattccgatcgcatatcctgtctccaattgttcaccccaacaaattggccgattctattttagtgcacttggattctccaaataggtagggatgacgtctcattctttacggtgatcaattttgagttcctacgccaagggctccacagaaaccgaaaaaacaacttctctccacttcaatccgacgaccattacaccaatgtctgaaacagacgccctgttgggcaaccacagacgctccaaaccctctctactatctctagcatctaaatgcttaggcagtgaccttgatactgcgcatggcgacctagtccttctattctgttatattatcaccggcctgctcgacagctcagcggtactcatatggggctcctttgtgagcatgcaaaccggcaacactgtatatttcggcctgggccttatcggcgccaaggatgatcgctggatcaagtccggagtttccattgcggcgttctgtctaggctcgctatgcttcgccaccttccaccgtgtcttcccagcgagacggagatgggtgctctgtgcctcattccttgctcaaaccgtgtgtgtgtgcatcgccgcgttgatcgttacaattcatccggcatctcgagatgcgcccttgacttggttggtcctcgtcccgattgcgctcatcgcattccaaagtagtggacaagcggtgacgagccgtgttttgaacttcacgggcttgactagtgttgtcctcactagtacttattgcgatttgttctcgcaccctgatttcctctcgggaaaggtggtcggtcatactgaggagaaccgccggattggtgcaatcttgtgcttgttgttgggggtggtcttggggggtctctgggctcatagctctgtgggaatgatgggggccttgtggaccgcagccatcctgaagtcattgattgttgctgcatggttggcctggaagggaaagagcgaggaggataccgaatgagttgcaaggctgatggaagatcgcggttttgcatagattgtggactcatattgatgtatttagaatactaattggttatttcgaaatagaggatactgattatactatctcagttttctgcaaccatgttcaacgactatgaaatttggattttttgtctactgtcttgaaaccccgtcaatagatctagagtattccaatctaggggatggtgtcgcccttgatatctataattaaaaaccaataagatatacatgtatgccttgggatattctccatagtctactccatctcccagcgtccaagtcaaaattcatatattcatttcatggtcattatcatctcgtaatagcctagccaggtacataagaaccaaaacgaatctcaatgtcaatagctccgctggaccgtcatcgcaggcccgacatagtgtcttctgccctgaaacaggtacatcaaaagactgccaatgaacacactaacgaaaataaccacactccaattaaagtctcgagccgaaggcaaagggctcggaggccagaacgaccaaaagagtgcgaaaataacatagagcagcccaatgatatttatcgcaagaccgaaacgaccaagactccaacgtcgaggaggtagcgtttcaggacaagcaatcttccggtaaatcacgcaacttatggataccgcgtatgtgtacatcagtgcagcaacgttgagagagatgatcgcgttgaatgcaacctccgagcctatgttgattaccgacagtaagacactgatcatgcatgagagcgcgatcgctcgcactgggattcgccgatgaaggtcaactcgagagagccagtctgcgaaggggaggccgcgatctcgtgcgaatgcatatgtttgacgtgcagttgatgcattgaataggatgttactgaagatgactggtattaggattattgatgtgaggccgttgacaccggagattgagaggaattggtggaacacgtagaggaaggggaagccggtgctgtcgttgatagcatcgggtactgaggggatagcaagaagaaatccaacgattactatcagtgctagtattccgttgccgaagtatccccatacgattgcgattggtacgtatcgacctgcatccttaacttcttcggacatatgtgcggtggcgtcggagcctataaatgtgtccatgttagccttgtaccgcgaaagaatgatacggtttgtacacactcagagagccgtagatggctgtaatttgaccgatcatcaagctgatccccatactagaccagttgccaccattgtggaacgatgtgaacacggttttggccgagttttgaggagccatggtgaacaaaacaaccacaatgatgacccagcataacagatgtagcacgagaaggatgttctggattcgtggcatccagcttgccgcgtagacattgaaaaagtaaatgacagctatcatggcgaacacaaacaaggttccatgccaattttggggcacgtagctcggatcacggagggttatgagaccttggatgatagttccagttagaaacgagccggatgctgctcctgcctgccaggctagtacggacatccatccttaatcacacccattagcgatcgtcaaagatgaatagacgagcgatctcaccagtggtgtaactcagaaacttctggtaacgaggcgaggaaaactctgatacccaatgatattggcctcccgatgtgggtgccctgttggagaaaggaaatgtgagaaatctcagaaaatgaggcacataataactcacatcgaagccatctcggctagcgaaacaatgataaagccaaacccaacgaatgtccacatgtaagaccagaatacaccagccagtccgccattttcgagaccttgggtgtttgagctaaggatgaggcgattagcagctgataagatggcccaagagactgcggctcacatgagtataaactcccaggtagcttgaaggaccgctgaaaagctcaacgctgcaaggggtcgaaagttgcgcttcaaacatgtcagtgacagtgtcctgattgtgtcacagagaaagaaagaagaccttcaattcctggatcttccccatacgcgtcatatcatcctgatcctgtggactgccctccatctctggtaaatctttcgtgggatgttcttccatcgtgtgaactctgtcaaaagaagagattcgattgtgtgattgtgggctttgcggtggcattttgacaaattggacaagtccgaacccacgttgacatatcaatatttgacttacagaagagccaactccaaggttagatattagtcaacgacacaaactaacatttcaggattggaggtacaaaaatacgagacacttggctttgccaaccgaaggcaatctcggctgttccgctgcaggcatccccagtagtgatacaacgagtcgactttgaagccgaagttctccctccccaccattgttacatacccctcgatggacgatgaaatctaccgataataattcacaccaggccacatggcaaggcctccaggaacagccggaccggaatcggcataacattttgtgaacgttggcactgccctgaagtgccacagcgcgtttcgacgcatatctggtcgggtaggaccatttttcgctcgagtggactagttcatcatccctgtcaatgactgtaccgggttttctgcaatttattgcccgcgtactccgtactctcgccaagaataagatgaatcgaatccaaccccattccccggatgccggcataaatcgttgtctggacggaattcggtaacgaagctatcagaacgccactcgctggtttgttcagctgccagccttaatttaatgctccattccggcttctatctgtatcttcccgcgtcgatgcaggaagggttgaattccgggctaggttgtacgaagaaatgggatttggaagtcgttccgagcttggttggccatgtcagacgctgccactaggcatatatctgggcaataccaaacaaaggcgcctcaaataaatgacatggcgcaaagaccaaaatcgagaactgcgagagtcccactgtggcaagtctttatttttagcgtcctgcgcgcaggctgcgtctttccctgtccgttgcgattgcaattacggcaaacgagagtgagctacacatgtactccgtattgtgttgcaaatatttctagtatgagttactccattatcttactttgttgtattcggcacaatataaatgtaacagtgaaattaaacactccgagtggccatagcccaccagacacatgcttgatcaccaactcgaagttcatagaaccttttgcatttacatattcgactggatactcaaacagtattaggcctgagaataaccttaatcatgtgcctgtgggaatattaagcgcccggatgatctgcaaaatggcatgttaaataaatacattgaccccgttcactgaatgcatccatatctaaaaattacccccgatatatgatcccaccaataggcacaattagtttgaatctgttggaattcggtagcgtctgttgaccaccagggattgtgatatctcccagaaaggaaaccacgtattccccaaatctcgaatcaagctaataatacgcaacttgaaaccaacagtacagtcacagcgcatgtcccggtggatcagccaatgcactaaggtcaaatctcagttttgatacaggctggagtggatggagatctgcgattcgtgattagtatgccctgcatcacagtgtaaatcccctgagtcagccagtcagtttggatcaagctgaatatatccttcatcgagtccctaggaacagatcaggacatgtttctttcttttggccatggcaactctctccccagtgccgcctggcttgacacccccgctgacagcggatacggaaataaaccataatggagtgattacagtcatcgcgtccttttcactatttctggtccttggatctctaggcattcgtgtgtattctgcatacagtagaagagtccgtcagttggatgatttgactttcgcagcgactgtggtaagtctttccgtctcaactaatgcggacccttttagaagactgacgaatctagattcttgccttggcacaggtatctgtggtttttgtggagatatatttcggctggggaaagtcaaagtcgctcatcgctgatcaagattggaactcgatcgagaaggtaggtgtctatgaccaggatgctgtatcatttttgacacaatgtccttctaggttggatacagtgcagatatcctctacattgcaatattatcctcatcaaaagcgtcaacggcgcttttttaccggacgattactctacgtagctcgctatggatgagctatgctcttctctcggttactctactctgtgcccctgttactatagttttgctggcagtccgctgtgatcgacatccatggcatgatatcaataaccaatgttccgccttggtaggtcacaatacagttagtactatatctctactaactactagctgtctagttccctcactggcaagccgtcacagctttggatatcatttttgaaattgtgctgttgctatatcccatccgggcaatcgtgcgactgcatacgacgatcaacaacaaagtcgttgtaattctggtgctcagttgtcgagtattgtatgtttaagctctcactctaccagtttctacatactaacaatgggcatacttgcagccttatccctatcagcgccatccacctccattacattcgtcatcaagtcaattcatcagatcccacactcgaaggaaccttcgcgaccgttgttgcagagctccacgcggcacttagcgttcttgtactcacagctccgttaatgaaaccatttatcgcagcctacgtcgacgagaatggactagcctataccgacgacgcgtctaagtcacgaaccaaccagaagctcacacctaactccaaccgatcgaactcaacatatccttcgtcgcgggtgagtaattctccagcgaaaaatcgcatcatgaagaggattgacatatcggtggatcgcgaagatgtggagcttttggagagacgatgacgccctcaacgggaggcccgagttactatacacttaatgcattcacctgataggacacagtcacatcgcattatgctcaatatctgccggctaagttggtctgaatgaatatgggatcaggctgtaatggtttagcgcgtagagtgggatcagcacccattccaatacggggtaacagccagatatatccactttaggtgcgatgagtctaactcggatataatcggacaataccccatgtggaacttgataagggcaacgttccagtatcctggtgatagcagaagcgaatcatggtctcgttaacacgagattataccactaaatcgatcagcaagggtagaatctccatatcgggatatgaggtggcggaatcaagctaaaccaagcgtttgcgtggatcaattgcgctagattcggcgttttctagtgcacgccattgctctggccactcagtccagttatagatctttatctcaccccgcgaataagttcattccaggttatgacatcatcgatctacagtctccgaacttatcattctgttctctcacatccaggcactggacttttatcttttctcctgatcgctgacagtgatcgcgatcgctaaaagctctgaacagcgaccccagccggtgcgatggcagattatcgccattatcctctctcaaatgacgtcgacaacaggagttatgctgcagagaaagaagaggagaaccgatcgggggatgtgatctctcacctcgcagacccatttggggatgaacatgatgccgaaattaagtatcggacgttacaatggtggcaatgcggcatgatcatgatcgcggagaccgtctccctcggtattctgtctcttccgtcggctgtcgcagtcctaggtctggtgccgtacgtttctactacctctgatgcacagaataggaatccgctgactgctttccagtgcgatcattcttattgtcggactcggtatagtcgcaacgtacactggatatgtcatcggccaattcaaactcagatacccgcaagtacatagtatgggagatgctggcgaggtgatgttccatcctcttggtctagctcgctttggtagggagttcttgggaacggcgcaactgctttttctcatatttgtcatgggcagtcatatcttgactttcagtgttatgttggatacagtcacagaccatgggacttgctcgattgtatttgggatcgttggcttagttgtctccttcgtttttgccttgcctcgaactcttcgcaaggtttcgtggttctcgtttgcttgtatgtatatccaaatcttttcagaaccagcccctttctaactctcacagccttcgcaagcatcattgccgcactcctgattactatgatcgctattgctatccagcgccccggtgatggcaaagtagatgcgactacaacagtcagcctgtcaaaggcattcttagcagtgacgaatattgtatttgcttatggtgagtactaatcagctaccctgaccttgaaactaatctttatctagctgggcacgtggctttcttcggctttatttcagagatggagactccaacggactatcctaagaccctctacatgctccaaataaccgatacgagtatgtatgtgatagctgctgttgttatatatatctacggtgggaaggatgtgcagtcacccgccctgagctcgacaaagccaataacagcaaagattgcatatggaattgccattcctacggtgcgagcctccagcccatgtttgatttatgcagcatcctaatgtgatattatagattgttatagccggtgttatcaacgggcacgtcgcatcaaaatacgtttacgtccgtcttttccgaaacacaaatcacatgaagcagcgcacattcctctcgatcgggtcctgggttgcgatcagtcttgtgttatgggtgatagcctggattatttcagaggcaattcctgttttcaatactttgctgagtctgatcgtaagtagtcggggattgcatgtgacacctactgacatggattcatttattagacttccctttttgctagctggtttacctgtgagtgatattcggtacacaaactgttgataatgctaacctagattaaagatggtctgagtggtatattctggctgttcctgaatcgaggccagtatggggcgtcctggaaaaaaatggttctgactgttgtcaacctggtggttatcgggattggtgcttgcttggtatgtcaaatttcacaatgctcagacatttttcagactactaatattcatgaagtgcggcatgggcctttgggtttccggtaaggcaatgcacgatgattccagtggtgccagcttttcatgtgctgccagaagtggatgaaccctgatgtcctgatgttcatgaatgtctgcaattttttacaggtataatttggctttctttttagtgaatttgaatcattaatatcaagatcagtgttattctcggcctgcgtgttacttacatttaaatcatgtgttgttcgtgtattcgaatgatatatatccacctccaaacatccattttccgaacaaaggactgacgcaatattgaaccgcctgaatatgtactgagcttgtcgaacttccattcgaaaatacgcaacgatgtcgttacctacctacatcatgcatgactcagcctagcgtcgatggatggatgggtgccatgacgttttgcaagatcaaaaatcatctgttgttttagaatgtaaaaaaaagacacagatgagttcgaatgatcgatttctacgaaactggtgtgcttgcatatatgaacgggctcatagtgagcttctacccagtgctcaccctcgttgctaatatcagcaacgaaccactgccctcaattatcatcctccgttgaatacgcgagtcagattatttgtgatgcccagcaaggaaacccaaaccttactgtcctcgcacagcaatcaatcagagcgtgaatcaactagcttgcagaccgtgttcgacgatggcgacacatacgacgtggccgatgggttggaaagcaacgggggctcttcgaaaatcaagcccgagagatctccaaatgagaaagacaacctgatagtggactggaacggcacaaatgatccagcatgttgtccgattcccctccgagtatacaaggttcctctaatacaattttaggagaagcccaagaacttccccacgtggaggaagtgggtgatcactatggtgctaggaatgatgacactctgcgttacttttggctcttcgatcttcacaacagcaacgagacagacagcgacaaagttcggcgtctccatggaagtcacgttgttggctgtcagtttgttcgttctgggcttcgcctttggccctatcatctttggccccctttctgaactgtacggccggaagctaccgttgtttctgggcatgttcggcttcgcaatcttccagattcccgtagccgtagccgagaacttgcacactatcttcatatgtcgctttctgggcggaacctttgccagtgcacctcttgccattgtgagtttatttcattatttccaagctgcgcatttactttcgctcactgacttcctcctccttaggtaaatggcattttggccgatatgttcgagcccgtggagcgagggattgcaatggccgtcttcgctgcggcagccttcatcggcccggtagcagggccaatcgtcggtggattcataacaatttcatacctgggctggcgctggacagagtacattacagctatctgggcatttgctatctccagcatcgggatcctggttgtccccgagacgttcgagcaaactttactcacacaacgcgctaagcgacttcgcaccaaatccaagaactgggctcttcatgcgaaggcagaagaaaaggtagtcagttatcaagatattgcagtacaatatctcctgcgcccgttccagatgcttgtgcaggaacccattcttctgcttattaccttgtacatgggtttcatatatggctttctgtacacttgttttgtggcctatccggtctccttccaagaacagcgtgggtggaatgatggcattggagcgttgccgttcgttgctttcatttgtggtgtcttttgcggttgtttgattatcattgcattttcattgacgcggtatcgaacgttcatactccgcaatggccgagttcagccagaggagcggttgattcctatgattattggaggtattttgttgcccgtggggatgttttggtttggctggacgtcagatcctcacataatttgggttccacaagttatatctggggcattcttggggtcgggggtattattgatcttcctgcaggtattattatccctattggaagatgaataacattttacaaatacttacgatactcgccaggggctgacttatatcgtcgatgtgtatccgatgtatacaaactctgcaatggcagcaaactccttctttcggtcatggctgggggctggatttccgatgttcgcaccaccattggtatgtcatgtccctctattagcggcgcaattcggctaaccgcaatacaacatgtagtttcataacttgggcgtcgactgggcgatgactttgctaggttgtctgaccgtcgcgttgttccctgtgcccattgcgtttttcatatatgggccgaaaatacgctcatggagtaggtttaccatgaaggaagaatgaaggtagagctgtgagatattcagggccgatcgagcggagtttcatcggacataggtcttatatcgtgatatctgtgactggtcaatataggatgttgatatagactgacataatattatcaagtgaacatcgcaacatcttagtattcgcagctctagaccggaggagttatcaggccctttgtcgttattatgcaatttgtatgaccaaagttaacgagccgttactccgaacatccgtctcggctagaagttgcaacaaaaacgacaaatatgtatgacaagcagttcgtgttatcgcggcccgaggcataaatagtcgctaaaatctccatcggccatgtccgatgtggagaaaactgtcgcatacgaaagagcgaccttgatgctacacggtcgagccaatccggtagtggaaaccttaccccagcttttcaccagcgccgcagagtttcagctaagctcaatggcgcaacccatgcagcttgaatcgtccatcaccacatctcgtgagggggaacctggggaaaccaagacttttagctaatattatcctcccgcttcatggctctcgagcatttctactccactcttctcgaagacttggtcttcggttccacactctcgccaatgggagctgcgcttcatcgatccggtctgcgccgccccacgcactgctcggttccaccaatatcacgatcgtccggtgggcggcgttcgccgtccagtactcagatgagtgtatatatgatctttatatccaacctcgtatcgatttggcggggaaatcggtgtggcttgacctccaaaccctagatcttcaattcgtctctatccgataccaatattgcaccatggcgccatattttggcctccgtggcccttcgctgaatagggctatcatgtggttggtcgtgtgtccggccttcgtgacttatggatacaaccaaggtgtgatgggaggtctgttgaccctggaatccttcgccgagacctttccgcagatgaacactctcactgcaaccgccgcacaagagaagtataactcgactattcaaggtaagcttcatcactatacctggggcacagatcggtcccaggcccttggcacaccacttggcctgtttctcatgctgtatacttgcaggcacggtagtcgcactatataccgttggtggaatttttggttcactatcatgcattcaattcggtgacaggctcggccgccggaaggtcatcctgttcacctccttcatttcgataattggcgctgtcttgatggcaacgtccttttcacttgcacaatttatcgttgcacgactcgtcctcggatatggaactggcggttacgtggctacagtacccgtctggcagtccgagatctcaaagcccagcaagcgtggtgctcacgtagtaactgacggcatcttcatcggtgccggtatcgccttctctctctgggtcgacttcggcttttacttcgttaagaccaactcggtttcctggcgattccccttggtcttccaggtcctgctatcactaatggtcatgagctttgtgatgctcttccccgaatcgccccgatggctgatcaaaagaggtcgcagcgaggaggcgcgcgagattttggcggcgctggacgacgtcgaccctcattcggaacagatcactctcgatattcgcgatattgagacctccctagctatttccggaaccggttcgtggaaggatatgctgaagatgggcgagcagcgactcttccatcgcaccgttctcgcctgtatgggtcaaatgtttcagcagatgtgcggaatcaatctaatcactttctacgccacgaccattttcgaacaatatctcaagctctctcccatccagtcgcgtgtcctggccgcatccatgtgcctaacacagccgctgggcggcctgctggcctattttaccatcgaccgtctcggtcgccgcgtgctcatgctgtggagtgctgtcgggatgtcaatctctatggccatcctggctggcaccacttccgtccaagataacaccggcagcttggtctgcgccgtcgtgttccttttcgtcttcgaattcatcttcacagtcggatactccggcttgaccttcctgtacgccacagaggtcgctcccctccagtgtcgagcatctatcagcgccgtctccgcggccgccgtctggacttttaacttcctcctcgctgaggtcacgcccgtcggcttcgctaccatcgactaccagtactatattatcttcgctgtgctgaacgccgccatcgtgccgactgtgtatttcttcttcccggagactagcggccgcagcctcgaggaaatcgatgagatcttcttgcagtcgcgcagtatattcgatccgcctcgcattgctcgctcgcttccccgaatgcacgttgccgatcctcatgggttggatctcgacgccaaggatgttggaagcggtgatgaggccacgggcgagaagcccaaagtgtaaactattcacgaatatatgaaatgagggtgctgcttgtttagcgggatatgtaaatagaattcccgaccgtgtcccttgcgaccggtcattatagacttatcaaatgatgcattattttggttgattattttttatctttcatctatagtgaaacaaccggtagattgacgtatcgatccgatgatgcgaccggtgtttcgctcatacttggcgccgtttcaggctatgctgcagagtttcgtcattagacacaagaatccttatttccgtgacttatttggagagacgccttgtcgatcacatgcaagatatcaattgcgccaatatgggatatgaataacgtgaagaaaaggaagaaaaattaccaggttagagggcgtttgaaagtggccaaagtgacatccgaaggaatctcaccagatcccgcattagtgattcaaacaagcccggtttcatgatctccgtggtctccgtgttatatttggcgggtcttgtctggcggtacaggtatataacagcgtttgaaagggagtcattcgtgcttggaaacaatacggtcgcgatcgcacctcgaattcgccgagtataacacaaactcacgaacatcgaccaaatgtgttttattgcatggctcgtcgccctctctggagtagccgaagcgggcgaagtcctgtggagcgggttattcaacgcgtcggcgacggttgccgactttgacgaatgtgagtgagtttcgcgagttgctgtcgattggtactgacaagcaaagggtcatggtctaaccaagtcggcgcttggcagtggtatattcacgggacagcatccacggaccagtatctgggtctctcgcctgatcacaagaacccggccgataccagtgatgaacagggcatccggatcacaatcgtaggtcattttatctagtctgaaggacgagaagctaatagcagtcaggatggcacgtcgttctggaatggacaaactatggaacgatccgagatcattcctcagacaaaggcggatcttgggagcgggcatctgttctaccatttctcgctgaagacagaggacacgaatgcaccaaatgcgagcttcgagcatcagatcgcgttcttcgaggtatcactcccagttccacggtatagaagaaaccaacagctgacgattttccgaagagtcatttcactgagctcaaatacggcaccctgagcggcgcttcgggcgaagacaacgcgcttcgttggtacgtcggtggggtgtcgcactgggaaaccgacctgaaagcagggcagtggtacaacttcgcgtacgatatcgattttgacgcgaagactgtggggctgtgggcgtcagatgggtccgatgacctcacgcaggttgtgtcggctgtcagcgcgtcgacttcgacaaattccgcggattggcatgtcggcgaattgaggctcgacaatgggggcttggatgcagctgccgaggattggttttggtctggcatctttgtcgaggaggctccgatcacgtctagtattgcaggtcctgcgtaagacgtgacttcaactctatttggaatgcgttgtttgatcgtattgcaatcaagacaaactacttgcaaacatgccaaacctgtcaaacagccttggatttatgaggtcatacgtcgaacaggacaccgcttttggaataactctggaattgatctcatgaactatgtcgtcgtttgaattcgtttaaaaagtacaaaaaaggtttttaccgcacagtgtatccaccgtcaatgcgcaaatcgttgcccgtcatgtagctgctggcatcgctagccaggtaagcataagccgccttcagctccttcgcatcaccattgcgacccatggggatcatagagagccaaaggttctgaatatcctggggaacgaaatcagacaacccggtgtcgatgtaaccaggcgagatgctgttgacgcgggcaaagtcgcgccattcattggccagcgaccgggcaaggtgaatctcggcggccttggcaacgttgtatgaggtctgttcctgggggtagttgacaatgtggcccgacatggaggcagtaaggaccaagctgccagttccgcgctccttgaagtgtgcgcccacagccttggcgcagtggaaggcgccgttcaaatcggtgttgatgaccttgttccagtcctccactgatccgtctaggatgccgctgtcggctgtacgcccggcattcgcaatgaaggagtcgatcttgccgaaatctttgatcacctctttcacaaggccttccacgctctcccagttgcccacgtcgcactggtacagcttgaccttgacgccgtaatctgctgcgagttcctgggcgttcttttcgccgccctcccggcgggaggagtatgtgatagctaggtcggcacccagctcggcgcagccacgggcggcttcaatgcccatgcctcgagccccggaggctcccgttacaacgacgaccttgcccttgaggctaaggaggtcaaggatgtggttggctttggggacagggataggcatattggtaggtatagggtttcggtttggaggttgagagagatatgctctggtagagggtttaggtttttgagggtataaatgagaataggttttgagttgttatagcttattctcgacggatatcaagctgggcttatatatgtctacatccctctaatgacttcatggctctcgctctgacatgagagagccctacctgggcagccgagcaggtacctcctgtgcccggcttcatcaggttatgtggcttgctttttccaacttggcatatccaataatatcatcgaagggcttcgattatgacaatgttggtggagaaatttggcggggcagtgacatcatgagccgatctggtaagccgggagcagcccgaagtatcaacttgtttgatatcattgagtttttgagattggcaatgacaccggagttttacgaaccaattccaaataattctagaggggtctttcgagattatcgctcgtcagagcatatcgaagctatgagatgccaaggcggagtagcattgtcaacttagaagattccgaagtacaacggtactctggcaatccacgggagtaatagagtaatacgatagtataaaagtataaaagaaaggctgtcgacaaagccgtcaaaggccatcaagtcatgacggagacgacaaggtgcagcgaattagaactgcgagccattcactaagaaacaaaagtaatcccccggccacttccagacccttgtgtaggaaatatttccccgcataggaggtcaaggcgaagaatccctgccagtccagtccgtatacatcgattgtagcgagttccctacaccataacaaggccggactcttgttgtactattctgtatataaccttagaagtccactgcttattaaattcactatttaatgaacgtgctaagttgactcgcatcatacttaattgcctaggctttatcccattgtttagtagtctcactgcttcggctcttgtgtcttctcacgcacaagaccctcctgcgactcagaaggccgaaccgcatagggatcgacaacaacggaggcgaacttgtttgccttgaccttggtagcaaacagaatatccagttccgcataagtgcgacctttagcctcaggaaggcggaagaatgcccagatgaatgcaacgagtgccgtggcaccccagaagaacccggtcttgccagaagcgttccaggcggtcgggttcatgaagtatggctctagcacctgcgacaccacgttgatgatctggtatgctgtgcgcgcgaggcagactgtcaacgggcgcaggcgcacagatgatgtctctgatacaatggcgtatgcgatcgggccgacagtcagggaataggttaatagccagaagaagcagagtccggcttgcgcccacataatgccgttcgcggatgatgccacgtccaggataccgatcaggaagagtgttgcacaaaggattccctggccccagacgtacagcgtgcggcggccgaagccagtgatcagccaccaggagaaacaggtcccaacaaaggcaatggctgtgcacccgacgcccagttggaacgagcgagttactggcaggccagcttgagtgaagaaataggtaggtgaataggcgaatgtactaccggacagaatctgcccgacgaaggccatgcagcagatctcggtgcggcgcagatcaactcctttgaagcagtcgtagtaggtggtgccagctacaatctcggattcgagcttgatcgtgtgcaccatcatcgccagttgaccgttgatctgctcttcggtcttgctgccgcccagtcggcggatgttgcgctttgcgtcttctagacgatcgtgccggacgagccaccagggactctcgggtgcgagccaacaaaccaccatcaaaggaagcggccaaatccattgtaggccgaagggaatgcggtagccccattggtcctttcgttcgacgagtccgtagaggactccggatgcgatgagctggccgatggcccagcacaagttgacgtagatagtgaggtagccgcgcagcacggtggggcatacttcagatgcgtaggccggcccaatggtggcgaacactccccatgagagtccgcaaaggatctgaccggtcaagaggactgccgcagagttggcgaagaacgtcatgaagatcaaggcattgaggaatgcaagggcgacgaacattacaattcggtaaccgtacttggacgcacagtatccgttcaatataccgcctgtgatcatgtcagtgttcgtcctgaggtggtagtcgacagggaaactcaccgaagatacatccaaccgtactggccatgttaaggcccgtctgccaaggtgcagatacctgccatccgatagtaccgccataatcttgtccatacttttgattgaacgtggggtaggcgaagaagttgcccatcaggatggtgtcgtatccctccatgataatagacatggatatcaagacagaccacatcacagccttacggttctcgcgcaaggcctgcatcagagtctgcgtgtgctcatcttcggtagcttgcttggcctcggtgatggcaccatggcccagtgtgtcttctacatgattggcggcggtcttttccaccgcaagtacagtatcaacagcagatgccatgatgggcaattggacacagatagcggttgatgttaaccagctgtgctgtctcacaggatcccatcaagtctcataccaggggggactatcatctatatacaattcgcgacatctcagctgccaggacgatccatatttgcattagcgtgtatctgaggttgtggagaaaggaaaggtaattcagcgccggatcaccagactgcggtcagcccacctggcattcaggctaattgttgtgatggatagagtacggagagacatttctgagtcgtgcaatattcctgtcactgcgtctagaccaactctggattgtcgcacatgagggcgtgaaattcacacctatcggcaggaagaatatcgacaggggcaaattctgggattcaattcagccgccagtggtctttcctggggaaccgaggtttgggaaggcgatctgattggagaccacttagcgctaactccctcgtaatgtagaaaatgaagctattcccttcctgtaacggggaaaacggccgcacatacattttagggaggaatgccgtagtaaatccgacccttaatcaagcctattttccaattggaacaataatataacgaaccctgaacggtgttttgggccgtagatgttggcgagctccctgttggaatggggtagttgctctgggttggatcaacttgaaacttccggtcatccttcgcgcctatatttctttatgacattttacgttcaatcttccgtcttcaatcttcccaagtaggcgactcatgagtatggttaactcctctagccaatcagaccagtgtggtgatccaaaccaagtgggcttccacgggtaataccggtgtagatgtgtagtcttacggcagattttctgacaaggtgtgtaaacaagctgaattcgatagctgtatggagtgcaattgatgcacagtgaatgatgaaagtgaacaaataggtttggttgaggataattcaggcaggcgatcacagatctgatatgttaggaaggtacgatgggtaaccattccctcaacctcgagatgccaaggtatgtgctcgtgttcgaaatacgcggcatttcactgatctatgtcgcacacgacatgattttccttaccgccaccatcacacattagaatctcaggctcagaagcggacaaagatggtggaaccttgatctcgccgactcaatcactctctacaacagatcgacagctgcctggaagaaacgatctctttgtcggctctttcggcctttaccacgataactagcccttctgactcgtcctcaaactccaacctcttggcactgtgccagcgatttcagcgcgacgcagcgaaaccactagtatgcatatacgggggtataataacaggaaataacaaaaaacccaacagcaacaccgatgcaataagtcaacgaatacccaactcaactcccatcaatccgaatcaacgtcctaaactcattgttccgaatcctcgtctctggaatcatcaatcgcataacccaataatgcttcatatccgtgatgctcacatccctcccagctgagtgcacactccaattcgtctgatttttcgatccgagaaagacgccttcgactggtatcccacgacggtagtgtctgtatacctgtacaggctcagcgtttggtttgccccagacgagtcgtcctgtactggggtggtggtcaatccccacggcgtgccattccaaggcgccggcaccgggaccggaaaggacgtatgcttcgatttttttcaggacaccgttgcagcggagctgggttttgaggttgttgttgtcgcttacgattgtgatctaaatctttgttggttatttgttccccttcgtcggttatgttttcatgtatggaacaagtccatgcaagggtagcaacttacaaatccatgctcgatcgtgttgggtctgtcttctcgtaaacgtatgatatcgctgccagtctcaaagccttcgatgctgcataaccctcgagtcgcagttccattgtagcagctgtcaactttgagtgtccaaggcccggctatctttgtctcgttgttgtacaacggtagctgtgagcagtctgtgacggactcaatgaatggccctcgcttccctggatgtgcaccagcgagtagaaatagacacgcgaatacaacactggtgatcatgatgactgtaatgaaggagagtacaaaagaacgctgagtgtttgccatgttttcgtacagagaacgtgaatctttatatttctgccttcacggcgccatgttacattcattttcaatccgtcttctaagtgtaacagctctgagttcaatccagacaccgcggttctctatttctaggctgcaactaaccaagggctggtgttattgatatcagcccacttagcggccaaaatagacgatttcgcgtttcacgattggtggcgagctgagcttctagggcttctttttccaattgaaatgtttcattggacatcaaactcccttctccacatagtgtatccccactgcgatcaaaaggcttgacttaaaaagaccctgccgtgtctttgatctattttggaccctggaattgagacactcgctagaattttcaaaataccgttgcattgctcgccaaatcgagtttttgttgaagggtttgaaacccatcattccaagtctcccgtccattcccaacttcatatatattcataatctatgtcataaatatctcacgatatgttctagtatacagtctagtctactcacgagcaagaagcccttcggcttcctgggcgtactcggcgggcccaccatgtgacttgcccagggtttcagccatagccaaaccttcacgccgacccttgtccgcattaaccatccacacaagggggataggcagaaggatcagaagcgccatgaagaaaaatccacttcggatttggccggtcgcatcaacaagaacgcccacaatagccggcccaatgaatgagctgcccttgtccgtagcagcgtaaagagcgtagaacgcagcctcgctaccgggtggaatcatgagtccgaagaacgatcggcagtatgatgccagtcctcccgacacgactccgtggacgatggccagcgggaatatctcccacggctgttgtagcccgaacacaccccatttttttatgaaggggatgtaagcaagcaacccatagagtggtatcatctcaaacatgccaatgcataggatgatggtttgattcggccgtaggccgaagtaccgagatacatgtggccataggaatgcgcccgtcatgccggacaccgtcgcagtgatggagagaagtccgatcagcggtgtgctcagtttgagttccgtccgcgcgaagaggatcgccgttgcagagacagtggccattgcatcggagatcaggaaccatgctacgaggaacatgaggacttcgcgcagtttgatgactattttcacggtctcccatagtgatttccaggcaaaaccgatcagtcgtagccaggctcgccatcttgctgtgcctttggtggcgactgaatccaagggaggccccggtcgtgtcttgagcaaattacgagtgaccaaggtgaacccgccccaccagatgccgaccaggagcaatacgaagcgcatgggaagagtgccagacactttcacaagggaggtcttggataatgtgatcagcaggatgatactgatgatttgcacaaaaaccgccgcacaatatccaagaccaatgcctgtggaggagattttggtggaaagctgcagctccggggaggacgacggcggggccttggcccctagtccaccttctagtgagctccgtggctgctcttgtggctgaagtccgtctaaactatcgttgtcggcatcatcgctgccccaggcgttccattccgagttacctccgtctcgatcgaagctcgacatttccgcgctgtcatccgcctttccctcttgcagagatgggtcgttggcgacaagcacagggagataagagttcagcacaacaaaggatgaaccgaggcaggtcacaccgatgacgaccaatatcgatccgataatgaagataggcggcgcaatgaatatgaacaacatgctggcgagcgcaccggcgaatccgaataccataagtaatatcttgcggttgttctctatacatccaattggacaaatttgacgttaactcatgtccctctttcgcaccaaacattctcagtccggcgttctgcaaccataccgtaatccgccagcgcgctgaacgatatcagtgtcagcgcctgtatgagtaccgctagcgagaaggtgtacatggcgaagctagctgtattgacctcggcgccaaagatcggcaccacacattggccatgctcagcactatttgtgctgttccctgtggatggtccgacgcatggaagacggctcacttgcagggtgccgcgctcgcgggctaattgttccaaggtgagcggtaggaaagatcctggtggcgatcgataagtaattgattattttaggtttgcagatatgtcttcacgaacctacgccacagaccgcgaacacctccgccgcaatcccgtacgagtaccatcctaggatctcccggcggctcgttggggtggtatcttcaccggcataccgtggtggtcgctgctgtacgccttcctctggcgacgggggccgaaaggcagcagatatataggatagcatggagaaggttgtgtaaattctcccccaggaatccacaaatttacaagcccaggtacgcgcggatgcgggcggaagagccccaacgagcaacattgttgatgatgtcatcagatcggcaggatatacgcctctttgggaatgtcttcattttctataacaaagtatatggtagatactccgtacactgccctataaacatacaaagaagagccataaaacgatgaaacacaatatagcgcatgatcctcggaataaaagataacctgcccatagaacgggctgaatggcgatgagttcatccgaatcccgaatcgaatatatatatctcagaaggcctttgagcctgtcctctcatgatatatttccgatatctctgcgatctgaatcgatatcctctctaggtaggactgaggcgcaatattactaagttcggcgacgtcaacatgcagtcacatatactacatatatttaaccaggcaacagagtagtgcacaacgaatttcacgattatttcaaccagtcacccgtcatcatgcctgcttcggtgttcctccttggtcccggctttgtaggcggagaaatcattgactttcttctcatatcgaactacaacgtaacaacacttgtccgtcacgaatcagccgtggcagattacgccaatttaggcgtcaaaaccgtcgtgggcaatctggacgacacatcagtgatcaaggatcaggtcgcagttaatgacattgtcttctacatcgcgactgcagatcacttgtcatctgtccaagcaataatcgatggcatcagacaacgagcggcgcaagggctgcaaacaatatacatccacaacagtggagcaactttgctttccgataacgcccaaggagagtatagaagtgatatcgtctttgacgatgagcaacccgacgaaatccacgccctccccgattctgcaccgcatcgcctaatcaatctagtcatcgtcggagcagcccaagaattagcctcctacgccaaaatagccatcatgattccgccccttatctacggcatgactagtagggaacaccgcctgtcgattcaattgccgacgctcatccggtattctatcaaacatggctatgcgggtcagatcgggaaaggtctcgcagtttggagccagattcatgtcagagaccttgccagaggatatatgattcttcttcattggatagagagtgcacccattgctgagattgcgctgaatccgtacttcttttgtgagaacggtcaagagttgtcttggggtgaatgcgccgctgcgattggccatacactcaggaagacagggtgcattactaaatctacgccaaagcccattccgaaggaaaactgggatgatttgttcggggaatattctgggatggtactgggatcaaatgcacgaattagggcgaatcgacttcggaaattgggctggacacccttggagacggacacctttgcctccttggctgaagatgagattccaattatcgcgaaggagaccggggagttcacagggtatgcgagcgttgttgtgtcgtaactggaaccactcaaccgctgtgttttgccgtcgtcctgtatcacttgcacaagtaattaagactaaagacgtgctttggcctcgctcgggtactttgaattattacaaggcttccaaagagtaagatatgactgtctcaacggatttaaggatcgggagagaggcaaatcacaagttcacagaaaagggaagtcgagggacgacagtcgcacttgccgattccgggccggtatagggtaacttcccaatcgggctgcccctactcttccatgaaactcaacatcaagacttttgtccttccttcatcttcacacaaaaagacttcatatctgcagttctatcaaatccatgtgctatggcgattctacattatctcgaattcatcattggccggctactgtacccaattcgtggccatgattcaggccaaatcattcaatgcccggccttcaaagaccttcccgagcccaacatgaccctcgaagcacccgaagccggcccctcgggctctaaactacctctccactgtacttgcaaggccgctgatggcaagggtggtcttcctgaactgcgctggacagctccaagctgtcgcgaggaagtcaaggagtatgtactcctctgtgaagacctcgatccaccaatcccattccttgtctttcaccacggtctcctttgggctattccaccctcgaccacgaaagctgaagcggctgatgtccacccggatgatcacgccaagatctcccgcctgaccgttgctggttggcgctttgtgccaaacttgcttggattgccgtttgtcggcgctggtgcaccgctcggccatggaaaacatcgttacatcttcaccatcatcgcgctcgatgagtctctcaagttcacggctcccgagaaggtgacaaagaaagatatcaagcatgccatgatgagcaaggtcattggatggggacagtggattggcacctttgaaaagccctggcccaactaaatcatcatcaataccacttcttttacaaacacaactagtgtgaaagggacatcaggagcgggattgacgaaggagtccaaggtacttcggcagtgagtgtgtatctcattcccttacatttactagggttcttcatgtaagtatcgttatggaactaattccctaataacaatttatttttcggtcatgattgttttcaattctgttgtgcatttccaactaatttgtgcaatggtcaccagttgtagtccaagaaccctaggctagttcacaataacgtgtgtcatagctcacgtcagagcactttatattatccatcccagacacctgtttgcgatgttcccctgatgatgtcccaaatgtcccaatcgaagagcttctaaaatggtcagtcttgaaactcttcaaattctgtgcgagccagctgacacactgacctttaccggtgcaactcaacctatccggggagtttcgtgtcgtctattctgacctgctcattggtaaatgcagtcatgccaatccaataatttgccggaggtttttatgttcataatatctaccagctgggtgatttctcaacgattgtgtatatttatatacccctttgatcgttgcaatgcgagtaacagtcccttttggtttcgacttttgtcggcaatttccagcatgcgaatttctttacaaaccaactcaatcatcatcactcatctaacaattgctactactgagtgaccaccggaaatttagaatgctcacgagctctcgggttccattccacgtcttaatatacacacattttcaaccagcgatcactcaaaaattcgaataatcgactgcagccgacgatctgtctcatttgccatcaccaggtgccattttgaaggcgaggcccagtggagatcttgatggatgaaacggacaataattgacagatgagacagacagcggcgcatttggctaatgtcctcttctccccacacagaacaaacccccccttgtaccgaggtggtggccaatttggccctcaccttcaacgcccgtgccgctttctcaatcgccatgactaataaggtgagaatattagccctggcgtttgaagcaaaacatacttgacattgaaggatgaccactccctgttgctgcaccctttccaggtggagcaatattttattcggcccattcacctcctccgattgcatgacttcactaaatgcctgggcatagcaattgcagtgaagggaagaagcgtcttccggcagtgcctcaagatcaatatcttccagtgggagagattgactggaatcagtatctaccggttcgtgccagatttcactggagggcaagtccatgattctagccggattccgtactgttccggagacctgaattgcgttcggtgcgaggctgaacgggtaaattgcaccaccttgaaagagtgacccagactggatgtccggcgcagcggtgtggaggaacccttcaatggggggttcatcgaccatcaaaccgatgtgggaagtataacactgtgtggaatagtcaacacgcccagaaaaacggggacccccagaactttcgaatccgtcattttgttcaaacgagctatccgggctggtatcggaaaatcctggatccgcgcggttttcggcctcgtggtcctggatcccttgtccaatcttgtggtttcctgcgcgtcccaacggtcatctatcgacatctatatatactatggactaggtatgtgctcacctgcaacatccgagagcagatttgtgaaactcgaccactgaaagtttccctttggtggtgtaacttcagtgccggtgctagggtcgctcttgtacgactcttcccttgagctaggacccgagccggatgatgtagttggactcgggatccgactcgggaccctgcgcgccctttgcgccctctcttctggggctagcctcgtcggacggtcaactccctccacctcctttctacgcatcttgatgcctgtccctgctgctgccggccgaatcatctttctcttggccggccggcccaacggctgcgagattgaatagacacattgatacccatgactctcgcaacggtcacatgggtaggtgtggctacatcgtatcttcgcttgctggcaggcgttacaggttgtgcgcatcttttggttgcgaagtagttgaccgttggactggagagacctcttggtagaggtctcagccatgtgtaaattgtggaacagatgttgaaaggtttgtccgctcggactcctcaatcaacaagtatgattctccctggtcttgggccaacttggggtatttataattcatctcatgatgagttcacccacctctttcctagttgatattgaatgctgtcagcaacacaggaccacgtttgattgcactcccgcattcatcacgaaaggctgtttacccacaccacaatgacctccgtttacagcaattgccgaaagcacaagaagttacatggatcgaactttaccaatgacaaataaccttgtcctaccccccttgggacctgtgtgcgagtaccacgcttgtagtctgtgggggtgttgactgttcaaggatcaccaactttacctcaccatccatcagtgaacaattgaagtggtgacgtgaacttggggatttctttggatgctaattgattttagtaacgccgtcgtacggtattcacatttcatggagctaggatgcttccttacactagaatcaaacccgttgttgcacacaaaacagctgtttcctttctcgggcaacgtcctattctagttgctgcgtcgaacaactccagatggaaattcacggccatcattgaacaagaggcatgaagccgaactacaatatatgctagtcgatcgaggggctttcccataacagcggcatctatcaatcgatctgtctgttgacacttatttctacggcgttctcggagcatatgctcacctgataagccagttgcttgcgattcttatataggcacaacaattggtgcgttattgcggccttgacacgcatttcttatttctgatatgaacattttattacaaccatccacatctaattttctgatatactatacgaagtacgttgccaattgttctccaataatttggttgtccgatctcatttcaattttcgcagacaatatatgttccctatagtaaaagcttcatctttcacctcattatagctactattaccattccagataccaccatgcctgccatcaatccatccacccaccgtcaatggtggcggcagctaggttgatggcaggcatcgtggtaccaggaatcgtaatggtaggtataatcaagttataaacgaaccttttattgcttcgtataggggacatgaattatcttcagataatctatttatatattcaaaaggggaccttgcaacgcggacagcaagcgtaccgacagccctgcctgcgaaacagatgtgagagcatagtcgttactgggaataggaggggcgagagaggaaaacaccatagggaagtgaaaagtgtgcctcggggcttgtttttaatcctgtactattaccaatttaattatatggcgtgacttgattaaccctggtgaattagccctagctatatgatttcatggggaattgttgctcagacccccctgccttgaatttcagtaccgccttcctgatcgagtaccactcagaatgttccggccacactttattttttctgccatgtattctgcctacttctggtttacatagtaaaaaaacatgcattttgattagaaaaatcgtatatactacctgatttctataggaattagctccttgatgaatgagcagttgatgaagcagtcaacaataaagcagttggtgatgaaatagatagttgatacaagagatgacagaagtgactaaattttgttaggagtttacatacaagctgtaggtacctgctgctgtcttgctctatgtatcatatgcagttgaatacaaaaggaaggcggtactattcaggcagtgggcatccagggtgcaagcaaagattgggttagaccgctgtgccgacagtatcttacaatgtttatgtttccagataatggagagttccaaaaatagcaccttcgaaacgtggatcatattctcaagtctccttgaataaataatctcagtttccatgtccccatgcactatctcatgccaccaatccggctgtgctcgtgggacaatccacggaacggaacgaggtcgttgtcgcactgtcaggcatggtggttgtctctccctcggcaggttcatgtctgccaatgaaatagttcatagcaatgggagggctcaaccctgctgcctgaacaaacttcctgatatcgaatccggcacgtgcgctaatagtcttagggaacacatgtgcaaagcaatccggaaattgataggctgggggctgcgcgaaaaggagatagacgtaacgatgatgcgtgtttggtggtgcacgaggagctatgtacgaggctgccgggttatgtctgtccccgtggtcttttcctggaacgattatggaagggggtgacggctttgtacaatccatcattaggtttggctggtaccagtgtagaatgactgattggatatgggttcctggtaggatggcgtcgaggtcgatgaagagggtgatgtatttcttgttgcatccgaggttcttgctgctgatctcgggaatcatgctggcctctgggctgatgttaaattacttgattcaagccgttcgccatttgcatacctcggatatctaagtccatgccaggagtgatccattggcccccgggataccgtatttgcagttgctgactagggggcgaagggaacatctggactatgtctgttagaacaccaaagaggagtgcaagtggtgagatcatattgtgttttttagaatcaaccgaggagagtagttcgacaacatgtcaatcgggaatgcaatgactaaatcaattccactcggccttgtgattcaatttatagacccgctttccacaaatagtactatagtctcccgtgtatagtttgccgttgtgcatcagtttcggcttgtttcttgcgccattcccagcctttcatgtaaacaacacttaaaattggcgtgactagcgcaattgcgccagatacaaaacaatatgtccattggacaccaattcgcttgatcagagggttaactaaggctgcagcaccagctcccaggaaacaccgcacgaggttgttagcggccatcgcggtagcaggggtctcgtagtacaaatcaacgatcagaatgttcatcacgttatatgccgccgtgatacaaaagcaaattacgaagaccacagtaagggcaaccatgagtggtggctttaacggtatgagtactccgtacacgactattgagacagctgcaagtatctgaaaggaggaattaagtcaactaaccaactccaaggatgtctcagggcaacgtaccgtcattggcagaccaatctgcaatctcgcttgttcgataggaaatccaaggatgtcctgcttctggttcttgtgtaccgtctgaccggcattgcgtcgagaccgccggtaattccagtcaactaatactccgttgacagttgcactgagtaatgaccctaagcctgcaggaataaagcatagtccaatacccaaatcatctagatcgtagattctgtggaaaagcgcaggaattcccgccgtgaccgcgtaatagctgctgaagacaactccatttgctaaaagcaccagccccacaggtcggtggaaaagcagacgtagggttgagtatgggttagggacattcaagcgcctcctcggcacacttaatgcaggtggggtcatttcggaggtggtccaaaagtaactccacatggttcgattccatccgactgcagggctcgagccatttccgacaatgcctcggcacgtttcagggaagaatagcagcagcgggacgaagaaagtaccagctgcaatagcgagaaaccagaatattgcttcccagcccagatacttactcaacacacctccaagaatcggcccgattgaaggagcaagaatatttcccagggaagtaaagcccatgtacataccccgctcggcggacgtgataatatcggccgcgacagcggatgcaagggccacggttccactactgccacaactttgaacggcacgaagagctaagagtgctgggaagctgtgttgtagagcgagagcaatgttgccaaataaatatatcacgaagcaaaggatgtatgcaggtcgacggccagcttggtctgcaaatgaccctgttaacattggagagaggccctggcatatcttcaaactcagagaggtcagttattcgaacgtagtttgtagactctggttacttataacctaccatgtatgtcgtgatcgtcagattaattcgagatggactgactcccaagtcctttgcaatggaattcaatgccgggtagtagatattggccgataaaggcgaaaagctcgaagccagtgctgctgtcaaaataatgaggcgtttctgcgttggtgtgaagacggagtatgcctcggtgccagaaggggcacgcagcaagggggtttcttcatcaaccccatcgttctgctgctgcacttgatgaatatcttgatcgttcatgttggttcaaggtagaatgccaaacaaaaatttcacaggattccttctggatgtaatggcgaataaatacccgggtccttttgccgttaaatcaaccgtgaacccaatatcacagcatttcggtgaaggaaaatatatatgcattcaatgcgctcttacggtggaaaaggatcttatttctcgataaatttgataaaccgatatttttcaccagtcttcacaagaaaaagcagccaatgatatcggaataatcactctctcgttacatgttcgaactcttagatcttaggcctggggcccgaagttggctccgcatgacctgtatacagatgaataggtcgaaacagcttgccacgattgactagagcccgttagccaagataccacgccttcagtgaactggttccttacccatgtactctctccaatgtgccatgataccaataatgcggtgagcaagcattgccgccggaatcatatcaggctcgaaaccactaaatcaccgtgttggaacctgcagtcatcgtacacatgtcgcgagtgaacttacattccggtaaatacgaagttaccgtaaaagtccgcattgggatacaagccccgcgtactaaaaaactcatctttcgaagcagcctcttcgatcgcctcagcgactttcaatagcggttgattaacatcggtcatatccttgaggatactttggatgggacgcacgcgcgggtccattcccttgtaagtgcgatggccgtatccgaataacttttgctttccagattttatgtcttcaatgaaggctggaacattcttcggttctccaatgttacggagagcgagttgggctgactctgttgcgccgaagtgtaggggtccgtgtgcggcagccacggtagctattaggcaggacactgggtcggtgagagatgaggcagtaactactgttgagaagactgttagggccattccatgctcggcattcaggttgccaaagcggcggaaacaggacacgcgagtgggatctggtcggtttgtctttgggtctacaagaccggccatggcgaatagattctcgtagtaggtttggtggatcgatggagacttccagggaatgcctagtcggtgggatctcacggccccgaagaccacagcgtaagcagcgacagttcgtaggattatttggtcggcccgtttgatgtctctttggtaaatcgtcggatttgtggtcgctgggatcacatcgggcgtacaggccaggtaggctgaaaggcctgctagaaccagcggcagtgggctagtctccttgctgtgtatgtaagcgcttgttagaaacataagatggtggagatacgatcaaggaatcatcatacgggagattaacgatggtctggcgcacaatatcagggaccacttgcatatattgtgccagctgccggcgcaactcttcgaattgacttgctgtaggatatgttccccatagcagcaggtgaaacatttcttcaaagtcacacccccagagttggtctagggtataccctcgatacagaagtaggccgcgctcatgatcactaaccaccaatcagccagatatctcaagggcctttgtgtgattctcacgagaagctgataggtgattctgtcacggctgtgttttgcaatccgggatcataaacacgcaacccatgggcaacttggtctgcgcgattgctgttcagggaaggtgcccggatacgctgaaggtcggtcgcccgtactgcgtttcggttaatggggatctcataattcgcgttagtgcgtgagtcacggatgaatagaatgccagtcgacattttgaaccagaatactaagtaaaaatgaatttcggtgtcggagtttcgtggggaagtttcggtcaaatggttgttctgtttccttgtacgagtcaacgtcgctgattgctggccctgtcagagaagacatcacgtaaggcaacgtatgaagcttgccgacaaagatacacccggtacggagtactactggcattgaactctacatggtcgggctgtgtcagggatatgtttaactattctggaaactataaccttgcattcatcattatcactcgttataagcacccattagatgttttcttttctttagacagccacaacgtcccgcatttactccggcatgtgcttgaatgggtgggcaagggattcctggcagaaaggaagcttgctgaccgtccagatctcggtgtcctacattgagcgaggggtcagtcacactctggtgaaagttaaatctagccctaacttgtgacacttacgggcttcaagttcttcttgatctcagtatccaaagtgccggccttgatggcaatgatatcgggagcggcatcaggatcgtgagcgatcggggaaccacactcagagcagaagatgcggtggacagcgtggccggaggaacctttgccagcccagctcttggtgggacccttgatagtcagcttgtccttggggacaacagctacgagtgctatacaaagtcagcaattgtgtttctccgtgggtatttacgcaactaacaataggtcgagccactctggcgttggcagtcatcgcagtgatcataggcagtgaccaaaggagcgtcaatgtccacggtgtacgtgacggctttgcaaaggcagtgtccggagagaggcattgtgtatgaattgatggattgattcttccaaggtacttgtgattgaggacctccggagatgggtggaacggtatttaagggataattccccccaacattggaagaaagttgaactggtcatggtcattgatatgtcaagtcacgaatacctgctttttcctttgctaatgctggtgaaacaggtacccggtacctaccaagttacgtcatagctacgctgtgctttgattgagctttttccacaaaatccaccaagtttgaccgattcaaccagtttgggcaattcgaattccaaatagaaaggtcgttcgggatttcaaatcggctagttctcttttttggcccctgtcagcccaaaagctgcaaggcaatgacaaattattgtgccccgccagagctctatgcaaggctttgggaaatttacccctccacaaagactcaacttagcgtgccactcatatcaagtctcactcgataatgctgatcgagctccacaaatcaccttgacggtggagatacgacccgccttatccgacggtgccgactcggtctccttcgcattcggacgctctccgattcgtataactgaaagccacaatgtgtgttcaagctgtctcgagaacgaaaatcgcttaggcgccacaattgagcagttcaatcattcgcattaaagcgaagatatcaggtgataagtctgctagcaattagcacggcttacagtggagcatatgtgctagtgagtgagctgaagtggagaatattgtgagtctacaatttgttctgcgatctgcgttgtgatcaaccgctaccgacccagacgctagacagcagtaaggagctaggttcgtgatccggtgacctggtataaaccggtacatatttgtcagtttatgcaatccgggcaagaagctaaactcccgaggatctgtacagagttcgtttaatacctccgcggtgagctcgcttttgtactttcccaattctcatgaacatcagagaactgggtcaggcctcaaataacgtagacgatatcccagaaatgttcgttgtcgagtcagatgtcatgtagctttgggatctttcttgatttgtgtacatagtataagttaaagtaggtttaccaatgtgtttacattggtttgtacaatatatatgtacaactgttggttgtgcgcatcgctattttacatgacagtatcaaatgttatagctgccataactacctcgtcgggcattgtcgatcttgtccgctgcactctgcatgcgcctgtcagataccgtattcacaaagtttaaactacacttacctgcatctgagctgccattcctccccgaggattctgaccaccataaacactagcctcagcatgttgtgcgtcacgggcatcatctttggtgatatatgcaggcacatcagcgacggctgtgagccccaaggcatcattactgtcggcaatcgaccgaatctgggcagagatgtagccaactccaggtggttggttaaatgcacgtccctatgggaccttgcgttagtaattaatttgacactcaatactttcacgggaattccctgacctctgtggcttgaatctcctctgcatcttctatcgagatcgcgctggatggcttccgcgatatctccgcgaccttattttcgaaattcatctgtcgcatacaaagactctgggccgttgctataatcggtcagtcgtgcgttgcttgaagacgcaatagagtttatgcttaccagctggtccacctcgggaaggtccgcgtccagtcaacgcgctctcagcctgtgagatggccgaaacatcatcctgtgtgatgcgctgtcccctctcggcagcgagctggatttcggcgacggtaggaatatcaaaattcatggctgcgcgtatctaaatgacatttgtttttctatttcgcttgatctcacagcttgttgttgtactatatacttcgactttagagccggtgatgtcacggtgaggacatatcaatcgaccgaactttgcctttcctcgtcagtggtgggggcgttgagtatatgcagacttcgaatagaacattcgacgcttcgaccaaacagaaattgtggggggatgcgtgataccccaattttgccatgtcgccaggcccctagcacattattccaaatcatcatcacctcgtggcacgatgtctgcaggaccatgcacacttggtacaacgcagccatgattatctggagatctccaaggcagaacatattgcttaaatctcgttgactagttatgttttagtggttggccccttctcaacggggtagggcagcttctgagcgccgttcgcgccgttccatggacgtcctgctgcagattgcccctgtcagtgccaccgctaccaaacccaaaaaggaaagaaaggacgtcgaataagaatcctcaggacgagccaacttccatgccgcgtcaccatcgaccgctctggccgaacgacggcaaccgaatatccaaccacgagatctggagagtcccacgttgcgtgacatggcatgatagcccaatggacccttgtcatgagtagcacgcctccattaagcttcatgctctgggtggtgtcagacacatggctacgagtctaagtcacggcaatgtacctttggccgatgtctacgaaattgctcaaggcagtttaagatttccagttagcaaggggtttacccaggagctctgtaaaccatacgatagtcactgttgcaagaccatgtcccgcatgagacctcatgagtgagggtcgatggggcatcattccggcgtttattgggacggacccggagatcaatttgttggaattgacataaattctgtagtagtttttgggctcgtgtaagaagaattgtgcattgattttgacatggaatatgcaatctgatactcaatgtagaaattgccgcaattttctaaattagaactcttacaaaccatacttatgaccgaatatttaaaataaggagaggcatgtagctaatcccgtggtctcaaggaaactgcggtagtaatagatttgacgtcataggctcttgtctgatagtactcggctagactttaaaacccccaaattagggcagtcagttcatttgagaacagatcgagaaaattggaagacataccacgtgcatcaagtaaatctgacttagaacattgacactaacgtgggtaccgaagaaagtgtccgcgtaaattctttgcttgatgagtgacagccacaggtgtagcctggcaggaaccgttcagcaggccagctggtctaaccctctattttatttttgctttagatcgcgtattgatacattgcgatgacgtatattttcttactccccagttaaaccatcactttgagctacgtacataaagcgacgaacagtttatagccgagaacgctatcttatttcgggctacggtacctttcgtatctccagtcatgctttccagtcaggctatctcaatcttcaggcagacattggcaacttgacattcaagcttgagatcatcaaatacatcacctaactcctctccatccgcgaggcaaatgcctagctttaattttctaagattcactgaaaagttcacggcgcgcaagagtttcaaaagctgcgatgatagctcgaggtggtaatcaaacataatgtctgtgatttccagattcacgaggcaatggggcaagatttccgtaagtggcttcatatcccagttaagtatggagttatcgggagatttcatcagatgatcatgtctgactttaagtgtttcgaggacattaaagtctttaaaagatccgaaagggttttcaacaacatccttttcagcaaccacttgatctttatatgcatctccatagccgatgcgtagggtcttgagagttgttgtaaatggaagaagagccaagcggaatttcgaggcatcgaactgcttctcctcatcgaggtcatattcgtctgcctgtatctcgactctgatggaaatgtgctcaagatgtgtacacactgcgagccagtccagcataccgcgacaccagtaaccctcttccacagtaatatcctggacagggcacacgtcttggtaacttttgaggtccatatcttcatcttttttctcgcctattgcggttccgtagatcttgcggacttgagggaaataaaagaaaggctccacaaagcccgaatcaatccacgaagccccccaggcaacacaggctcggacctcttttaagtgaggaaacggcggctcgtggtgaaatggctgctggcgtttcgccgccttgagcaggatttcggatacgaggtcggaatgttcatgctggaactcaagaattcggaggttggttagccggacaagaaataggcccaaccatgcttctccgcatattccctcctccccatgaagatgctctgtccacaattccttttgctcttgctcttccgtggtgaagatgtcttccagcgcatgcttgatgaagctttgcatctcgtcgttcatttctaatggatcatgctggtcacattgtgaccagcataggtcgagtcgatggacttgtctggcgagctccggttgtctccacatacgcatgattaagccgatgaatgactctgtaaaattgtccgaagatatgtatgaatacatcaaaggcgagaatagatcatgaaatcgtcgacaggtaaggcttagcgaatgcaaggtagactgagcgcaaccatcttcctgggcgtgcttcccaatagctagaagaagttcattcggaagtcgatccattttgaggaaatgtgcactctggtgattgacggccttatgaaaatcgtgtattaaaaaatgatgaccaaagtgacggagggccctttcatttaaatcagatgttacactaggcccttccaaatcgtgcgtacgttttctgtctcaggtgagacagtggatcgacgcttggcgtttaagactattgtcttcgcgtttttggatttcgataccgcgtcgaggctagatgtgcaagaggaaggaaacattggatgttcgcagtcgatcgaaacttttttcactttcgctgcctagacgataggtccgctaaccattacccactaatcagcgaagatctagcagggaagacgaactcaggattggacaccatgggagactaaacagggttttggactagcaaaaactaaaatatttaatatcagaaaattgcataccttattcttgtgtcccttgtctcgccgaacatgcaccaacgtatgccaagagatccaaacggtatgttcggtgaaccaggattttcttcataagctgcatctcaaaaactaatggtctaagtgttcagttggtcttttatctctacaagaagctatttgatcatctaagaaggccgatacggcagctgcgacatgaagagtttatagagttagtttatattttcctagctaggcaggtacaggtacaagctaaccggtgtttgagatataacagggaaaaaattacggaatttctgccgagtgcgttagacactgttcaaaggaggtttgcgttgagtgtataatattttggtacggtatgtgtggtgttaaaataggatatatatgtctgtagagtacaccctaggaaagagattgtttaagtctgttcatctatgcagctcacctagtatttatagacatgttttgtatactcactcagaagtgagatgagttgtggtccccttctatgaatggttccacggataaacacgcttcataacttcaggcctgataaatcaggcaatatgatcctatcggagtaactacgtaagcagaaatcaggtcatgtgggcccgcctaagacctcacgttgatacccctagtttaggcttatagaaatgctggaaatgtacggtatctttgtgattagatcatcccgttttagtatgaaatatatggtatatttacaagggatttctacgggatacatccattcttatatactagttaggatcgttcagtcgatttcagggcacagtaccattggtatttagtctaaatatgaacgactgttagttatttctatcttttcaggtaagcatcacatgacccatgcccctcaaccctccgcgtcagaccaatcacaaacctgccagaaccccgttaccgggattgagcgctaccactctgttttcccctatcctatgatgaaaaaaaaatcaaatgaagaggataaacagggtgtttgatcacagctttcgcttgatttgtgacctacaagcccgataagagaccgtgttcgcccaggactcaaaaatggaggtgtatgagcatctattcgaaggttgttctgaaaaatcatgctaaggtaaccatacacagattacccaaaaaaggaaagaaggcgtgtactatgtgccgccagcaaaaggtacggctgacttccccttttattcttttataatgtattaactccagtaggccaagtgtgatgtctggcgggatgagactaaagcgtgttcccgatgccgagaccgcaacctcgaatgcaccatagatgacagcttcacaagagagcacaagcgtcggtaagagcccgaacccgagtaagacggagggaatccacttcttatagttctccaagccgatacatggcattagaacacgagaataagcggtggcgccaacaactacagagctcacagcagttgaactccgattccgtgccgattgcgttgcccacagcgacaacggaattaggcgtcccggccgtgctgaagtcagatggtcaagtggacgattcgcagggtttgccgctaccctatccccaatatcctcttgcaccagcgagctccacatcgggtgtgatgatgggaggggatgatccgacgaagccccgttcactgaaaagccttaccgttacaggcgcagagattgatgacctttatcaattgtagatgtcccccaaaccttgcggtccacaaggtgctaatatcttgcagattcttccatcattatgcctctttcctcccgatcctcgatgcgcagaccaagccgaatgcgtactacgcgcagtctccattcctgttctgggccgtcatcggcgtagcgagtcgatcatattcccgaaacccgactttgcagactgcgctggcccaggaagtcacggaaatggcatttctgtcggtcatgtcgacgtgcgcgccgtggcacatcatacagggactattgctcctgctgacatggccgtttcccaaggagaatcgcccagatgtgacatttcctctcagcggcatgcttttgcatgtagcgatgcaaaatgggttccatatcccgatgtcgagccatgaattttcccgggcgaagattccggccccatcggagttggatatggtccggcgctcagagctctgggctcattgtgtgctggtgtaccaacggtgggtttctttcttgcaaattgcgagcaaccgaaatcatcgtgctgattcgtggcagatcttgtgtgatcaaagggcagtctccgcaaaatctgttcagtttggcacaggataccatccaacgccaggtactatttgataagattgccccggatctggttcagaaactcaagtgccaggatgtcgttgggagatgcagcgaggcagttatggagaatggagttcgtgccatgtctctggaccaggagctggctttagacattctgctgcggaagtatgagggagaggtagacgatattgcactgcaagccgtcggtttgtttctcacatatacccctggcaatagtccatccactaacgcttgtttatttattgcagatgacgagaggtatcacattctcctttgtcgtatgtcaatccacattttccatttctacaaaaatcaaaccctcgtctctagtggatgtcttccacgtcttatcgccaccgcttgcaacttgatagactatgtccaagcctttgcggatcgtatgggagctctcttcatggcgcctattcaaataagcttcggtctgctcctggcctcgatatcactgttgcgaattctcaaaagtgaatatgcctctagcggactcgatacgagccgtgcccaggcgtctttcttcgccgccatcaatttggctaagcaaatatccaccgacagaagcgatatagctgctaaaacgatcactctcctgactcaactctggaatagcagcaaggcattccgcaaatccgatggctcggaatataccgtacttcgaattcgaagtcgcttgatcctcagtcagatcttggatgcagtatggtggtggcgtgatgaatatgaccctaatgcgcgcatgaagatgcaagcgttggagtctgttgacggtccttcccgaaccaacatgcttccaggcattgaggcagggcgtgctatgacgggaacagatcccgctcgggagcccgctgggggaattactcagaacttgggtcatttgcaaggagagttcgagatcaacgaggattactttaccaactttgagtggctgagtgatgaaattttctcatttcctccggattcattgttagcaaccaacttaccgtgagagcataagttgacttcgaatctattaaggacccatgttacctttacattttcctccaatcgcggatcacgcctttcctgccgcacatatggagctgatatcaggcctcggtatctattacaaccccataattgccgatctcgggccattacccttgtatgtgcaagtgtcttcggcttaacacccccagataccgcagaccccacctcgggatgtcaaaacaaagatctcaccaagtctacgccactagaacaagcaaccatggaagcaatgcttggtagatcacgatgtacgcgtggcctcccagcccggggctatgaattctgcaggtgccttttaagcactccacttgattgatagagattaattgcctgcgatcggccttaagctcgattcgggggatttccggtgaattagatatggaatatccacaaaagagtgcatggataattttaccttgacattgcacttatgttaaatggcaagcaaccttggaataaccactgcgtactaggtggctatgtacagagcaggcaactacccctgaacatgcctcgttaagtgagattgaattgccggtttatattaaaggcggtcggcaatacattgtaaccccgcttaagcctcggctccttatctccaagccttcccccagcttttgcttctctctctctttgtcataggaattatttccattggtcaatatgttcggctttgtgcaactaccccggtcaagtcgaggcgaaacccatgttagtttacggagcacgggcacggagtacggatactccgcacagagccctcgatcgttccgttcatgttttctttcccataacataatatcaattcaatcgttagatggcagtgattattcctatcacgcgatgtacccccatcacttggcatatttcttggcatatatctcgggccaatgaggagtatcgattgtaagcgccctcctcaaacacccctgcaagtccgcggggcctccggtttgagacatgatagattcgaagccacctcattcgggtggtatccagtcaatcatcccagccatagaagcccactagaaaagtctccccacacattgttccacagtgcttgtcttgccctacctgagttggcaattcttgtcacccgctaatcatattagggagtccgagggagtccgggaacagccctaagatgggatcggacaatctcacaactccattattagctccggggccatggcctaaattcgactaatgcccaagataagaggctattgccggttatttgtattgcaggggctacaaccatctttgtatctattgggaatatggcctttcaccaaaaccgattagccccggagatgggccaacctggctgaaatcagacacatcggttggttggccactcattttagctgctaatttagcgtccacgctaagttcataacggcaggttgaccttctaaggttttttcctccgtgcgctggcttatcactaacaagctctcaggggattgcttctatgtcttggaagtaggatgtacatggtatagacagcctacgctgtctagaattacttggaaaagtgactatgctgtatgcttcaccccctactaatacacctcaggtattttatgtttcctatattcctctgtgaaatcccctcgaacgcgaactgggctggagtgaatagtcccatgtagtcgaaggtaacccaaggaacgccaccaagtatctagatgctcagatacgatggatgttctccggattatgcataaagagtaaacatgagaggtctgtgggctaccgggccaaaacaaggccaaatcacaacgtgggatgatattggtcgttgtcttgttatatgcacattgccactttccgcctcaaagcacctgcctccagccactcaagtctcgtggctctcgtctaaccatctctcacttctctacacccctgtctctcttccccccacttctttcttctcgtcgaatcaattccctaggtcgtcgctcggtctcatctcggttcgtgggttacatccactccaggataagcctgagatatcctctttgggcgataagacggacttccgacggtctcagtcttcgatcagctttaaatcatattcgaaattccctgttgttgctttcctttttctcattcctctcgtctccctgtgaagttgacatcggtactccatacgcttcaccatggagaaggacgagtctatcgccgtcaccaccggcgcgatggtcgacgagactgcgcctgatgataaactcaagaagctgcgtgatctcaaggaccaccatcactgggatcctaacatgcccgaggatgtcgttgaggaactcgatgaggcattacatacatccgacaagcatacccaagaggtcatcgctcaggaactcctcgagaactccccgtaccccgaggttcggtccgctgtctccaacgtcgatgagggtggatcagtcaacactattcgcgcctgggtcattggtcttctatttgcgaccatcggctcggccctcaacatgctgttctccatgcgccagccttacattgtcattccctcatacattgcgcaggttgtcgcctaccccgtgggaaaggcatgggaatggtggatgcccaattacaccgtccgtatctttggctatcaaaccgaactcaaccccggtactttcaccaagaaagaacatacaattgtggtgatcatggcaaacgccactttcggtggtggcgccgcctacgcgacggatgtcctcttggctcagcgtgccttttatggacaacgtttcggctggggcttcgagatccttatgtgtatctcgactcagatgttgggcttcggcatggccggcttcttcacccgcttcctggtgcagcccgccgccatgatctggccctcgaccctgattaacacctccctcttcactgcactacacgatgtcgccctgccggatcccagcaaggtcgctggctggaggatcggcaaatataagctgttcctgtacactatgattggctctttctgttggtactggttcccaggatacctcgcaccattcctgagtatctttgcctgggtcacctggatcaagccccagaacgtggtcatcaaccagctcttcggtggagcgaccggcctctcgcttatcccaatgacatttgactggactcaggtctctggattcaacttcagtcccctgattgctccttggtatgccatctccaataccatgatcggcatgtttctctggttctggatcgtcaccccggccattcactactccaatctcttctacgctcagtacctgcccatgagtgactccagaagttacgacaacactgcgaatgtgtacaatgtcaccaagattcttactccagaattcacatttgacagtgtgaaatactcgaactattcccctctcttcctgtcgacgacattcatgctgtcctacgggctatcctttgccagtattatcgctgtgctggttcagactggtctcttcaacggtgcggatatttgggctcgattccgtcgcgtcggaaaggaggaggaagatgtccacggtcgtctcatgaatcgctacgctacagttcccatctggtggtacttgggtgtgtttgtggccatgactgcaattggctttggtgttgtactgggctatcctacacacatgagctggtgggccttcatcatttctctgctcatttccgccgtttggtttgttcctattggcatcgtcaaggctgccactaacatcgacatcggcctcaatgtcatcaccgagttcatcatcggttacatgcagcctggtaaacctatggccatgatgctgttcaaaacttacggttatatcagcatgtaccagggaatgtacttttcacaggatttgaaaatcggtaagtcccgtcgctggctatctagatacattataccaacagtcctcttccattaggtcactacatgaagattcctccccgcgtgacttttatggcccagatggtcgcttgtctgtggtcatcgctggtgcaaatcgccaccatgaactgggcactgggcgcaattgagaacgtttgcgaccaggcacagcgtaaccacttcacctgccctaacggtcgtgtgttcttcaatgcctccgttatctggggtgtcatcggaccggcccgcatgttctcgatcggcgagctatactcgcccttgatgttcttcttcctcgccggcgccatcctccccgtcataatctacgtcggcgcccgttacttccctaagagccctatcaagtatctcagtgcgcctatcatcttcggcggtgctggtctaattccccccgctacccctctgaactatctcacctggggtatcgtcggatacgtcttcaataagtatatccgtgaccgctggcgcgggtggtggatgcactacaactacgtcctgtccgctggcctggatgtcggcctcgctctgtgcaccattctcatcttcttgaccctcaacttgaccgataccaacttccctgactggtggggaaccaatattgccgccgacaccatggatgtcactgatacagccattcgggtcccgctcgctgaaggagagacctttggtcccaccaagtggtagacaatcggacctattccatgttactttggttcccttgggagccaattatggttgcaattcttcggatatccgtttagttcagatcagacacgaatattcacgatatcacagtaataacattgatttatgttttcctcaaactttctgtatctaatatttcgagttcattacgtggctcgacaggagcctaataatacagcgaaggaacttatttctatctcttcactttccttacttcctttatcgcaagcagtaatttcaaaatccaaagatagcttcaaatgcaagatatataaaaatatgacacatgtgtacacgcttatcggactgacgaccaccaagactcaaatgcaaatcgaaaccgatgaaccaagaaaggcgaccttggtcatcagcacataccctcagccattcttgatggtaatccaaatatcatccagacttcattccattccaccctaaatccaaactattttaatcctcaacatgcatattttatttcaactcaaacccgacgacgacgcataccaacctgcaaaccaagcggcttgcgcaggaatccctcacgcgtctgcatagggccatcctggtgcatctcaaactcgaagagccggaacacagtagcacagataacgagaagttccatctcggcgacgttgcggccgacacaggcgcgaggtccgtggctgaatgggataaaggcggccttttggcgtgcggtgagacgctccggattccagcgctcggggacgaattcttcggcgtcggcgccccagatttccttggagcggtggatcgtgtagctgggtactgagagcacgtcaccggcttggaaggtgtgtccgcagattacgatgggcccgaagccggcggggatctcgcgaggaagtcccattgaggatgtgctgtggatgcgcatcgtttcccagatcacccattggaggctgggcgtttgtcagtttgggttaattgtgtgcgttgatggggtgtgggcttactaggggatttccttgaccatagcgtgcgtgggaacttcaatgtccttagggagggcgtcgtccagggtcttgcgcagcttggggataacgtgtggggtgatcatacaccagtagaggatggcacaggtggtgttggaggtggtgtcggagccagcaatcagttgagtcagggcctcggcggtcagttcggcgcgttcaagctggttaccgttttcgtccttgccctccataaggcgggcgagcaaatccacacgggtgttgttggccataacctcgggcttcagacgctcgttgacacgggcgatggcgataccagcaaggtgctggacagcttgcagaccttcgtagaagaagcggtccgggatgtacttggcgaaggggatgagggacggcatgcagccaagggtggcagatacctcgccacgacggttcagaacttcgacagcggcgacatacttgggagggtccttagggtccagacgcatctcagcaatatcctgtcccttctcgagcatgccgaagggagcaccgaaagccaagtcgccgatgatatcgaaggccaggtagttgaaccagttgagggcatccaagctaacatatccggtcttggggtctccctggaggtcggacagacggttccattgcttcacaaactcctcgacattgccatggatatattgctcgaattggccaatggacttggcactgaaagtgtgggaaacggtcttgcgtttgcgggagtgctcagcacggtcacgggtgttgaacaagccacggcggatagagacgaaggcatcgtagaagtccctaggatatcgtcagtttgggtgcagttttcctgggctgcaatattgacgtacgctttcaagaagccattgccgtgtccatagacgctcaggatagcttcgtcgtcggcaatggagacttgggtaggtgagatgcgaacaagctttccatacttcttatgagcctcatcaatcgtcaagtacttctttccctgacgggcctgcagcagcagccaaacgttggtgaacgcggcaaacccggcagagggaatgtcgcgcaggtgcgacttctgcaagtacggcaccaagtaataggctacggcgaggccgagaagaataaaaggaacactctgaagtgtcacaaacatagtgaagtgctgtataggagtgttggacaaaacaacacggagaaaaaaggtaccggcccaatgcagacaggataatgccgatctgaatgcagaatgtaaggtcaaacaagaagaatcaagccaaatccatcaccaagcacgcgtatataacctatttatgaaaagaggacgtgagatcatcgaatcatccccgagggtaaggaaagcaacgggaagcaatttcggtagtgtggagttcagacactggcggcgaagatccgtggagagtgccgtctcaagcctccgaagctcccgatttcggttattgacatgggggttccagacaaatcaacggccgcatattgacgatgtggtgactccattctctgtatggcgtaaatccttggtgcttgatttgttgaaatagagtgcgggggggatgacacgaggcgccacggacgccagatttataaggcaatagtatgtgtcatccgttctagtcagccttggaggtcgggcatcagcttacgtcagatcgggcacaaatccgaatcggggtatcggtatcacttgcagaactcggtgagaatgtgccttggcatgttgtatgtacatattaacgttgaaaatgtagatgcatggatatacatgaattaaaatggctcctcacttcccatcttcattaatgatgacgggcatgatcgtggcgatgactcatgctcatcaatccgtgcgcccccaagaagtcattgatctgtttataagccccggtggcattatggtgcagattaatagcatggccagtgtttggatggacataggcagagaaagcactggccgaggggaagatcatcttggcagcagcaggaatagaagccggtttcccacccgtgtgcaaacagtcgcctccacagaatggcacatcgttcgcaccgtcaatgacataaacagggcctgtaaaattgctctgggccggtagaccagtgatagtcaggagttcaccgatggtcatgggctgcttgttctcttctgcaaacttcagaagaccggtgtcgaaatggggcgggtagaagaagagatatacattgctgccgatgtccgcactcttcaagtacccagctgtgtagtccgagttcttgccgttgagacgggcttgctggaagttggcgccgctgagaaacataggcatatagtctgcgcttgtcgaatacccagtgagcacgagcgcatcggaaagctctgggtacatcgcggacagagcaaccgtctgagcagagccgaatgaatgcccgacatggacgatcttggtgggagtcttgatattagatatcgcaccgttgcgcaccatgcgggtcaactgggcaagggcctcgacctccaagaatgcctggatctcgttctttgcgtcgccatgtgaggagttgccaaggcccagtcggtcataggagagtgtatgatatcctcgagacaagacgtaatctacataggaatatgtatagttgttgtatggtagatcccaatatctatatttccatattagaccccatatagagaaatcaatttatctctcgaactcacgatttgtcaaagcccatcccatgtgtgaggatctgaagcgtgtaggccgagttcccggtattcttcggcatgcagtattgggtcgagatattgtagtggcccgacacggtagcatagcccgacaaggctgtttctgatagatttctaccctgtttggtcgctgagaggacgaaggaagtcgcgtcaaagtttgtctggggcgtgctgatgttatcgaacacgccgttgcgagcagtgacagggacctccactgttacattgtaacaggtcttcgcagcggctgcaccagccgtcaaagtccaaagtccgattgttgaagtacgcatcgtgaatgaattttaggtgtatctctgcactcgttcaatgaacgcaaaggggagtgtctccattatatagaatttccctcagaaagctacacttgcgacaaaagaacatatcaaaaatgcggcaagtccatttcgaaaaagtcggccccaagtgatttgtcaaaaggctgtgattctaaagttagagtggaaccgtactaatgcatagatcgatagcgcaggcccatcaaaggttgttctccggtgctgagcactgaaagcgtcttggacgttgaggtatcaagtccttaacaattgacataatccagcattagaggcatcaatcatcgtctacatttgatctgatacctcagtctgaagggggtgaagatgtataagtttgccgtgctcgctgcatactgtcgatccgaatctaaattggaacgaatgatcattcacgatctctcagtcattctgatccacttggcccgagccctaaaaatgagaactcaatgatcacgggtttctaccgaggttgatcataacaggctcttggttggtattggaggataataactcagatggaagcaagaaaccgagtgattttcaaaattgggactgtgaatatagagtatatatgctgtcgagatagtctaatagtagtccactttcaggggaattagggttctttgaaaaacggtcccctgaacagtgcattagcgagaatatagatccaactgctgcgatatatacccaaatccgaggaaacgatctacaagacctaggctttcgtttggtggagtagtcgatagagtctgaaaccactaaagatgcaagaaagaggaccagagcgagagcgagaagaatgtagccgtgcacacccgaaattagatacaaatctacgctgtcgccatgtaaattccaatgcgataaatcgtcgtataaccaagttatccataagtcatatgtgcgagccgttaatcaccagcgatcgccagttacagggaacaacccgttcttcttcttttcggcatcccaccgctctatccacaccttcatctgatcccggctcttctggctgccaacatttaccgtcgggatgacccgcccgatacgcaaagcgcagcagaacatggtcaactcgcggaacgaactgtgttcactgtagggcacgccaaagcaggcactttctcgcgtgctgccgcgctgcggggtgaggtcttggctggtgaatggtgacttccagtgttcgccgtgtagtacagtggagactggtggattttgcactagtcgcccggctggtgggcggtaggtccaaccggtcggacggaaaccgacaacacgggagaagtgtggtttgaagccgtcaaggtagtctgccagtgtgtcggcgcgaatctcaaagagggtttgcatatgtacttgtgcttcgtgaggattgctggtcagcatcgcggacagctcggggtcttccaagcaggcgcatattcgttgctttggtggagtcgcgaatatcttggatccaagtgctcgggcgattcccatgcatatccgttctttgccaatgctgtaagtgccaatcactacgagtagtcgacctccaacctgcgagcctttgtccggtgctttgttgttccccgtggcagcggagaggaatttgctcatcaaaccatctgtgctactcttccctgtatcatgtccgacaccagcctcctgattcaggcgtacacacagctctgaacacgctgtgatcacatcttcctgcgcaggaaagccatattttgggtttaggtatgtagtgtcgaggtaacatttgtcgatgtgttgttgtctcgacttaccagtgaccgggttggtcacattagggcgcaggagcggatgttgcacctgagcaggagatgcacggaagtcaccacaatgcagcacccgctgattatgcgcattgggcccattcccagaggtttgttcgaaaagaaaaagtgagctacccgggcaatgatttgcatgtatcatggtgacccgtactccgcctgtctccggtacttcagtagtagattcgaactcgaggtcaactatccacttgggatcaacgcggagctgctgtcggacaagattggcagtgggtcgactgcagtaaatgggcccatggcaccaagacttgttgagtcctatgtagtgatcgctgtgaaaatgactgaggaagtaggcgttacatccttcgacggctccgtagcggaaggcatcaacgcatatggaaaaccccgaaagaattttgtaaaatggacaagtccgttgataggcttgtttgccgcgagaagacacttcgtttgcggctgcagcagcccaagcagtatcttctgcatttccagccatcattttcgagaatgcggaaccaccaatggctttcttctgcgagtagggatcactttgcgcaggccgggcaatggcagcgcgttctgcgcgtgtcatccctttgtcgatgtcgcctgggttggaagtaggcttcgccctaggcttaggggccggtggagccgggatagggtttgcttggccatcaaggcagccgttgacatgcactccaatttcctttgctgggaattagcatttcagtaggcccaaaacgcagtaatgagcacctacccattcttcaagatcctttagcaccatttgacagatagggcatgtgctcacttccccctcaatatcttctacaccagaacagtcctttagatctttgtcaggatctacctcaaggtcgatctgctcttgttcctcgccctcccaaggccaatttcgaaattcttcgcctataagcccgtcttcttcttctatatcgtcaaaattcgcgaattcatcattatcggcattactcgtggcggctcttaccagtggcgggggtataggttcggaagtgcgttgtgtagccactattttatccggttgcaatacttcgttcgtcacagtcgtcgtgacagttgtagtttcttggagctcccgataggcttccatatcctcctcgctgtcggactcatcgataaatggtccgctcctcttctggggctttgtagttgctgatgcaggtgcggttgcttttgtagtcttcgattcgtctgattgctgtgtctcgttcactggagtatccggtgagtcgactttccgacgcttgactgccgtgtcgctctcattatatcgcttgtcatccgctttcaagaactctttatcttcaccccaaaagtcaggcgtggtcgatcgctctctttcactcgtcaccgctgcttgttcaatctttgccagtccctttttatcctctaaaaaaagcccaccagaaggatcatttcttgcactattcccccggattgttgaagcaccccggccgctgctcggtgagcgtgaagttgctgttacaaattgggtgatccgagcctggcgagaagtggcacccggcggcgtgtcggtcttctggaagaaactcaagatgctcgaattgcgctttacggaggattgtcttgtgccagaagatcccttggaaggcgtggcccctttcttcgcgtaagatccggccattgtggttcagcggagaggtgggagtccgttgcaccgtgtgcgagaatcgagttgtggcgagggtctaagaaagttcgcacttggcccaaagtagtttgatatcggatgaaacacaaaaagtatggtcaaatgtacaatatgtccataatatatgcaccgtcgccagagaaatgtatgtcaggtcaatcggatcgagaggcgcgaagaaactggatcgcgacacgaagtcacgtgctcattattacttgactcctagcggggactacattcgattttggtatgtttagagcattgtgatatagtcaaatggccaaaacaaattgctgttcattattgcaaaaaaaaaaaaaaaaaaagtctagcaaggtatcatgaacaacatagcctagatgccagcatgagctataggcgggtaatctccgacgacattgcttttgcggcgtatcaacaagattcatgagcggtagtccatggtccgtttggtatcttggacgcactcgagggtatgggagtttcgaatcattcgttgcatcaactcgtctccccggtcatcaatcggggccacatgaaaccccatacatttggccatatagtcattttcattgctggagaccaccaagtgggaacaacggtattgaagagcgcgatgcgtgatttgtcgtaaaattgaggctagagtcgtttagcgagccttgccagcctggttggcagcctctatatgatgacggtattagtattgatttctagtttccgcaactttcgtatatcctttaagaaaggaaataacatagactgagctcaagaactcagtcggggaagatgcgcaactcacctcgccgtgtggcatcctccaacaaccccacgtcaacctccgaccgaggcaacatcacgtaccgcaccacactgccgcggatgaacatgttcttcaccgaagacaggtgaggatacttggccagctccaacacttcgatatcatcgagcttgatgtttaggtattggtcgaccgatttcaggattccacgaatgcggatgtcatttttgagctcaattgtgaccgtctggttggtcagagtcttgaagaagctgtaatagcgagcccattagttcctgtccacacaaactgagtttgcgctccgcgtcatagcatacctgaagaaaagcatggttgcggtggataggaaagcttggaggggtgcttggatgaggataggcgcgctggatcaaagcggtgatttgtattctgccgatgtcggaaggtgctgtgagttggatgtaagagcttggataatgagtatcacgagatttagggacaggaatgtcgacggcgctcgagagttggcaaggtgagatgcaaaagagaagcaggctgacgggatcacgtgcacatccccatataagcggttccaactcaaccaacgctcggccatattccctcgagtttggatttctatcgactagaaactattggaggcttgttctaggtcattcagcacatatattcatgaaatatatctctgacttctaacaatgcttatgcacgtctacatccgcttacacgggtgaatcatgctttagccattccccattgaataagcgccgagtcctttgaactaaactccctggttatgtcttggataaagtaggctagctgagcctataaacacatgaacaggagtataaccccaccgatcgaatgcctatcgcttgatatcatcaatccgaaggaaaaacccccacatgatgaacggggacctcttatatgggtcaaagcgaccggtatcttttcttccgcctggcaggtcgttttatcgctgtaccagctcaagtctcgatgtttatgcatactggaggatccagaagccattccttctgttccattaggagttattcaggctttgcgatgaggctagttacgtcgagcatattgggattaacatcatgctctatgatggcatttggcatcaatttgcagctggataccaagaacttccgggtggatcagaaagaacgaatgccatctatgagacctgggaaaagggcatggcgacgcccaacatcaaaatctcgagcatcggcgttagattcttacgcactaccaatactcttatccctgatgcagatgtgcgcgtgattgatatcaatggggaaatcggcctcagtccgtaagggtattgtcttggttagtgatgtgttggaatactagggattctcgattcttggttggctgtagccacaaagtgtttaccactaatttcattagatgtacagcatgatttttccggtcccttcggttgtcttttggtcatttgtttcactcaaagttgcttctaggctgacgcaaccttctctacaacatccgcgggtaagcaaccccgaaagccgaggatcaacttggcttaggagggcgggttattcttcagcactgcagcactgtgcagattgtgccgttggtctgaaacatagttgttggaactactttgtacaatgtaaagtcactaataatcttggaggacgaaaccatcatcatgcattggctgcatgcgcataattctggcaaagtgtcagatatattgcaacgacataagacatgcggaactctaggcttgttctttcagtcgagattatcatttaataattgccattttacatggtgagttcccatggcgtgctgacttctgaacttctacaatatctagcgccaacttgtgaaagcatcccggtaagaggggaaagtgtacgacatcgattcatatcaacatgagaatgtatgtattgaactggacatctggactctacgcgcctttagggtcacatcgtccacattttaatgaggggcaaatgtgacaatgaggtcaattaacatataatttctatcttaagagaactatacttctctagcgtgcattagtatagtgaactagatgttaaattgttggacttggcgatcttttcccctcttttcgctctttttcctcctttttctcttctttttgcgatgatcactacctcatctcaccaaatctcccatcatatgacattaattaggacgatttcctgcctttttcggtgctggaaaggtgcataattgacgttccatccacctccgacgggattaattcgactaaagatagtagcccggcgcctacagtcagccaatcaccagcctcttcacactgcatatcactctcatccacctctcggcaggttcgtcacaccatctacgaacctcattcgtccattttcgcattttgaatctcatttactggactctggctcagaaaatggccttggctctttgctgacgggcgaaacccctgtccagcgcgacgcgcccatttcctctccaccaataagatcaatgtctgctaccctccagaccagggtgattggattaattgtgcccaaccttgcattagtctctgtaacggagtgactctttctgaagagtgatcggctgctcactgcacataccccgtggctggtggaaagcgcccaattgactataaacccgtcccaactgccacaatttctgtgaacgctagcgttcttcgtttcgtggacttcattctcttatgctcggtgcctatagctctggtagcttttgcatctgttttatttcttattgttatcttgctttttatctttcacttcacagacccgttgatcggtgtcgccatttcctacgagtcaagatacccatagatatttccgtgagcgagtcacgcaaaaccaacatccaacagtttgatcaggtgttcaacatgaccgatatactccgtatctcgactgtacgattcccgccccctcggcaggcccgaggaacggtgcttaatactataatggaggatacgcgcgaatccaatttcgctcaaaccagtcccaaaggctcgcccccgtccagacttacaccggcagctatcagcccgcagttgaagttgcagaccagcgggttttcggtaccaacacacgcccgccttgcccgcctaatgtcgcctctctccgccggcactacctcatcatgctcagatacagaatggcaggctcagatgcaagagttccgaggatacgacgacttttacgatgccacagatgatgatagtattgacgataatgaaaccgaaatgagcgattcatgcttttcccccgatacgcggccatcgagcttgattaccccaatcacccgcaattcggtgacctcaactgggagcagtcggaagcgctctctgacccttgagattccctcttctgcattgtggccgtcaattaccgggtccctcaagggctcgccagtcccgcccacccctccatccaagataccagtctcgccagcggcgctgtcgatgctcagtcgttctgtacctgcatcatatgccccgccttcgctcgatggtagcatgacctcggaccaagaatcaataatcagtgcattggctacaccggactctcaatctctgccagacaccaactgggatgcacatgatatccatgttcgccgagatctggacggaagcgaaagcgatctagacaatgcggactccagttcagacatccatactgtacccattgctatcgagacccagcatgaggactggcgtcatgttctgggaagtttcccccgaattcccactgctgcccaggcatattcacccccgctctcgccatcgtcctcgccttcttttcatctgaataatgagccaatttacgaatatgatgacttgtacgacgccccacagtctattgaccaaggcgcatttctgcctaactcggcactggcaatgctacaccacgttcacttagaagagacacccgattcgtgttctgagacctcggaggataaaggcgagatgtggcaacttcagccgcctcccagccgcccgagaagtgccgacggggtcactcccgcatctgagctgtctggttacagtttcagcgatttgagcattccatctcctggtggattctttgcttctttggcgccccgagcgcgccacacgtggtcaatccccaacaccaattaccaaccatcgtcggcggctgcagagggtttctacaaccttccttggcgtcgggatgatggagatattgttgagcaggtagttgaatggcatgagccccctgttgacgaaaacccagtcacagctgttcgtgatgaagaggccccgcttactgccattcgacttccctgtgacacacccactcgtcggtctatctaccaagatagccccatgagtgctgcatttgatgcagtccaggttcaggagatcccccgctctgggaacggatatgaatacgacgagtgttatgaccaagagctgcaggaacgtgcagttgcgagccacgaccggaccaatatctggttgtcagcccaagcatcttacctctccgctcttagtgagacaaatcccgcgaatgacgttgagcctgtagaatcacccaaggagtctgatagtattgaggttgaagccaaagacaccacagaagagtctaccactaagatggtgcgattcgtcgagggtgtccctgagtccctcagtcctctgcccccgatccttgctagcaaggattcaatttactggcgaggcttccagtctattcgggaacagtcaaccaagacagatgggttcatgcatcgcaacatgcgcttcgatgccgtccaatccatgcgcctcgccatgaacgaccttcacatcaactgcttgctgggcaagtatgaacttgttcgccccgagcgccctgcatacaagggtccattcgccaaggcacctcgcaactcgactattacctctgagctggctgagaaggccaaatttgacaaggtggagaaggagcagctggttcttgctcagctttcgcagcccatgtgggccatggatgctcttcggtctctcaacggcggcaatctgctcacaagtcctgcccagcgtatgcttgcacaaacctcatcaaagcccaaggcctcgcagggaccacgcaaacgcagcttccgcatcctagacctcggcggtcagtcctcctgtgactgggcctggcaagccgcgtacgaattcccaaatgtcaaagtttacaccgtcgcctccaagaaccagaccgtaaacagcgccatcaaaggccctcccaatcaccgccaggtgaacgtggataacctctgggagcttccctttggcaacaaccagtttgatgtcatctccgcccgatctttgcacgcactgctaaagaccgaatgtcccgcaggcaaggaccgcgacgagtacgacctagttctgaaggaatgcatgcgatgcctcaagccaggcggctacctcgaattccaagttcttgacgccgagatctcgcgagcggggccgtacgccagtgcaacatcagtggagtttgccttcaacctgcgcaaccgtgggtacgatccagtagcatcgaagagcttcgtcgcccgtctccgcaacagcgggttcgtcgacacgcagcgcgcgtggatggtcctcccgatgggtaccgaacacgtcgagcaggagccgatgcgcgagactccggcaccgcgtgtgcagagccaaattgaagattacgaggcagtgcagggcccgattggtagcacggcggatattgccagtattactggactgattggagggtggatgtgggagcagtggttactgaaattgcgagtggagatgggtcgcgagcgacctatgttgcttgagggtcttggtgcgctgtttgatgaggggaggaagagtggcgcgggctggacctgcctgtctggatggactatgaagccgaagcggaagagttctgtctctttggctgagactgggtctatctagggatatcgatctttatgtatttagctctggccctggtggctcgcaattaatgtaatcaatgctttatgtctatgatgttttacttcaataagatcgaacacaaggttccttccttcaccacctggctcccaaccatttccaccttccagggctagttatatcactctcggttcaacctcttcttttctttcactcacttctatttcatcttcagttgatctcttcctttgctctcaatcgacatgacccctgcgagaggggacctgcctgtgatctagactatatcaaatgcgctcatggtggccttctcgaggctttggatgccaaatcgattgccaccccagagtttgtggagtgcccgcctctcaaatatcgcccgggatgccggagacgtcggggatatgttgcccgatgagtttaaccaagaccgtgctacttgggaacgtattgtgaggtctttcggagacctcgggagttggatggccgatgctcgtcttcctgatgaattaatattccacgctatcatacctaattccatgcagtaggaggagttgatacacgatctcaaccggccacgaccggctgaaccagatgtacggcaaagacggagaggcaaagcgactgaaccaaccacggccggaccgggcaaggtcggatcctttaccttacgtttgcattagagcctacgcctcagtacctggagtttctgataaatggcctttctccatatccacttgcatgggcttcttaacatcttcgagagtgcagatatgcttctcttcgggtttttgatatctgcgatcactcaccaaatctccaaggaagtagtcccaggttatgacgcagacaaaaaaaaggagggtgtttatctcgaggaggagagtccgagagatcctgactttgtgttgtgagagataactttcgtgcacttccattcgtttcttctatgtcattaattttctacgtcggcgagagtcttccctcgcaaagttcccattttcccgttcaaagtactcttctattgtgccgtagtcaatgcaaagtcaaaaggcaataagtaatagcagactagcccgttttatgtcgggctcaggagtcagaactccctgaatcgcttgctggagagaacacgcttaacaccgctgttaattcgactcggaatgttgacgctgggactgtgcctggagcggacgttcgatgcaattcttcggtggctgttcttctatgcggtcaacatccggacaattcgctttgtgtcctgatgactctcccattttcccttcagacatcatcccagacactgaatgtttcccttacggagagaagaaagacaaggagagcagtcattgcctctatcatatctgtcgcagctgggtaccatgcatagggagacggacggggcggacgcataaacaagatagcggaagtctggctgcggtactgggtatgtctctacccaaccgaggtgatctctcataggggccaggaatactatgacaattcaagtttattgagatggtagcataaaacttctatactccggagcagtgtgccccgctacaagcactgataatggcccactttgctaagacgtatctccttgggtaacgaagcggctattctaacggctattgagatttaggtatctgtatggagtacccgatcttccagttagaatgatgagtcgtaagatcggcgaaggggagataagctataatgtgttgtatatagtcaactgagcactaagccaataaatactccgtagcaagacataaaatatagtgcaagcagagctaagtcgaaatccaaaccatatcaatccataaaagactgctaaggaataatcttataagcaaccggggagattcttcctgattggctcctgaactccgcagcttcgacgcagattctagttctatcaaggtcagcagacttgaagatctttctcccatcacctaaataggttatccaggatgcaaggatctcgaaatgctgatcctctatttcttggctgtaagaagtcaagattgtacacgtgagagtcagagccctcatcgcctgtactttgacagtatacagaaggggagacttcaaagaagaagatagaaagatagaaagagagaagaatacagcaaaagaagcccgagttgtagatttcgggattcacgctgaacccggctatatccactcttcgccactgatgtaaacacggggagcttcatatctttttttcttgataacccctccatccctctacccctccagactcctcgccccaattccttcctccaacccactcacgatacatacaacatcatggcgcctccagctatcatcgccccttcaatcctcagcgccaacttcgccaatctgggccatgactgctccaagaagatggaagagggcgccgactggctgcacgtcgatattatggacggtcacttcgtgccgaatatgaccatcggctgccctgtcgtatctcaaattcgcggctgcgtcgatcgtccttccgaaccctgcggtcgtggcactttcgattgccacatgatgatcatggaggtgagttatggacttccccatacccgcgtcattccggcacggcatgagctctccccgctgacggtcctttgcttcgttatagccgcataaatgggtcgtcgagtttaagaaggccggttgcgatctttactgcttccactatgaggcggctgtttcttccgtcgccgcgaccgatcctacggataaagaaactaccgctcggactagccccaagcaattgattcgctatatccacgagcagggtatgcaggctggtatcgctattaagcccgatacccccgtcgatgtgctgtgggatattgttgagagcgaggaccccgccgaacgaccagacgtgagtcattgccagattgcccattcttccacaccgcttcatttcaattgaatgggactaactccgtttcacagatggttctagtcatgaccgtgcaccccggtttcggaggccagaaattcatggcttcggagcttcccaaggtcgccgccctgcgcaaacgctaccccgatctgaacatcgaagtcgacggaggcctcggcctgggtacaattgaccaggctgccgatgcaggtgctaacgtcatcgttgccggctctgcggtcttcggcgcacaagatcccggcgaagtcatcgcgaagctgcgcgaggctgtccagaagcgtcgcggcgcggagctgtagagacggtacatagcacaaaaggggttaaggtgtctttgtctcatttgaggggtggtctctttaattttttatattatacattcttaatcacgagttatgaatggcatttacatgtgggagtcaactgtccacgctttcgaggttatttacattttcatactgcatgtacgaaaaaatcgattgtaccttaccaggcattcttgatgtacagatgtcataatcgtcgaattcgtgaacagcgactccctcgatcctggaccggtagttgcctactccgacttctgtgtgggagacagccctcccttggtatcatccttagactccgacttgatttcttgcggcataggcgtcgcaagcatttcagcaatagcattgcccttaggctcattgggttccatgagctcttccttattctcgacggccacatcatcaacaactggcacctccttaatcgatggggacttcgatttccccgccttttccgcagcctctttgcgcagagcatcaatattgcccgtcggctctgcagagatggactgcctaatatcatgcaccgtcttgtcttgctccgcgttgtcgagtgttggaatcctggacgagcgatggtgtccaaccaatccgagcatctctgcgttatctgcgtggaagtttgccgaggatacggccgcttgttcggggactagggtcggacgtctcgtggcctgtgatgattccggcgcggtgtcgggcaattcgggggccaccgagccgcggtgcgcgcgactggcgacaggtacccctgtagcttgtgctttcgcgtctttcttatcgtctgacttggtcttcgccttggcggcagcctccgagctagcttggcgcagggccagcacggtcatatcgtctttcttgtcttcatgcttggtaacgggagggttttggatcttgatcgtggagggtttgagggtagttggtgtcgactcggctttgggctcggtcgccgggagaggatagctggtgggtggcattccacctaggtcctggacgctgtttactaccatacgcaattctccgaattcgttccattcttcgatctcttcaagatcctacaagtcgctggggttagcggtgttcctggtatattggtacgacagaactgcgtgaaatcggcatctatgcaaggggctgtcacatactcccacaatatcgccgtatttcaccaatcctggaatcttcttgcccttggagcgtcggccccagagcttgcgggcagcgtcgtcggtggcgacatcaatggcgcggaaggggattttgttcgctttgaggattgtctcaattctggaggtcgctgtgataatgtgcgacgaccccgcggtcagggaagtgtagaggtagagggttgagtcggacatgttggagctgtggtgttgatggtgtaattaatgggtgttgaggatgagagatagggtcttatggaaggaatactgaattcattcaggggttagtcttgtctttcctcttggattgagcttctacaggagaaaaataatttatttaccccctaggggatttgttatgacgtggcttggtgggtatcacgtgcagatgaatgctctctcgatttcagagggttctccccctatatatgtctgtagctgtacttggtctatgatgtataccaatcccctcagtcgagtacatctctccacacgagccgttccacatgtccaactgctatctttccaggaccccagtgtggcaacttgacgtcagatccagagatccaagtatcctggaatattctggttggtttcacctgttcgggttcagtctggaacaccaggtctattccgtgaacagcaacctgacatctctcaagaacatgcgccagccatggctatagttacctgtcacatgtttatcaaacatcatcttcggggccaaggtctgagcatgatcagcatgcctacccactaactaagctatagactttatgaagagttgggtaagaagcaggttttagtaacgtcaacttaaaacgtctttaggcacttctcgcacttcgggcactttccctattattagcaattcgataccagttggttcacgaggtcatcaagtaatccaatcatgggagtgttattgataacggtttggactggtcttggcggaagtgccgaaatacaaagattctacacccgtatgggatgaataatcccttactacctgagagtacccaacaacagcccgatatatattgtattctgtgagtgtggtcacaagcacacgagacggatagtgcacacctataatagttcctcgtatccactcaaataagcaccaggtgtccctgtgttatagtaggctgcagaaatatatatccacggtcctttagaggaagagcctaagagcctcgaaggacgcgtcctacactggaggcgcagcgatatgcagaaagcacaccaatcatgctagtaggcaaagaaaatgaacctactgacacaaacttctcgcctgcttggaaaccaggccacggaacttgcatggaagctcgatctatgctttccccgagtcatgaaactgcagcccagctcaactcattcggcgtctgggatctattactattggagccggctcgctttcttctatcgcttgtcggcaaatcggccgagctgtcccatgtcacgcgatcgacatggggaagcaggctgcatctatacgtttaaatccagggagggcggactgtgggtgcgaagtatacgaattgaaaggcgttaacttggaggatatgggttctcaagccgttctatcacgaattaatactacgctcggggagtcaatatcattagtcaatatcatcagctgagacttaggcacgagcttacttattaaatcaatattccgtatagctctcccattccaatgcaatgcattagaatgacttgtcccgtgcacacgaccaggaatttacagcctatcatccaaggtggctgaaaggtggctcatcgatgggtttctagtcggacccgagacaacctctgactgcaggcatcagcttaaaagctagcattaatgcaggggcagacttatcagcgtctgggccatgtaacacccgcagagccacgagctttgacatggcgcaggtaatcacgcaagagccccgtaccctgtcaatccgttctccccgtagaatgacgaagtcggtcaaggatttgagttgacggtgagagcaaattcgtgtcgaatgtggggaggactcttagcttatcatgtatgtaggcgatagatgatcaaaccgaaattcgcccattcgacgggagtgatcccgcctgtctcgggataggaaaaatgatccatcgtcgaaatttacaatgttgtatgaagtacgaaatactacggtgaagaatttcctgttaggtgcaagaatgtctagccggcgatcctcattgactaccccatacagattgctccgtggccatgttgtgttcactctaagagctatcctgaaacagatcgacgtgatcgcggagggaggtacggagtccattttcgatgagcccgagattgccgctctataatgtaaggaatctattgccggcacaacatagtcgccaacgctcaacatcatagcggatcaataaatgtccaaccattatccgatcaggagaccgatccacctcagaccgtggagcctctgtactagtcaccactaacctcgtgtatcccgaatagtctcgatacggcgtatcggaggggtcaatcgatagcgtgtagacaggcatgaaagagaccataattgggaacatcgactacaacatatgagaacaccctgttgtatatttgataggggccatccctgacaagcataaacatgaaccgtgggactgcggcgggaaccttgcaacgacccacggtaacacggtaacacgtgaatcgaaccgttcgacactctatttcctcggctatgttgtacttcctcattaatcacgctattatcctttgctagtcatctcgatcggacattgggcgctgacctagggagccaaacagcgtcatctgcaggatgccccagctgccacgccagacgacgtggcagttcttggtccgaccgtagcaaatggatcctagggggttgtttcggagtatggcggtgctggaccggaaaacggaggggttttgtagtttctttcatgctcccgctgtaggcgcttgctacttgaggggccagtgacttggttatatgtatggtgtcatgtaccccggtttacatgtatcaggtcaccttttcgtaagcaaggacgcatctgctggctcggaccactctcggggtgatccggttcgctgcctcacttttagttccttttcgttctcggccgtctgcagcttcgcacccagcaggatctcgcttctagcaggtgtcggccctcttacccgggtgcatgcctctgggacatgggcttgctgatgacctcgccacggataaactttgcggccatgatattttattaaaaaagcagaaaattaccggaaagagaaatacatgactacccgaacatctcagggtccagacccgatcaccggcttccacgtttctgggagcacggagtatagtacggagtagtctctgcttgccaattctcgtatctctctttgtggggagtgtccttcatcgtcgatcagaacttttgtcttcttttatctactcgtcggcccaatctgcatttgcttcttctcccaacttgccatattgtctaattgtttttatccttcactatacagcagaccgtggtacattcatcgcaacgcagatcttcgacgattgcattgataagctcagctttccacccgcgcagcttcgacttaattttttttattactattgcgcttcagttctacgtacgcatttcttacctattctctcgcgcaaagcatgcgctaactattcgcagaatacaacccacccttctccatccattttattgctgatagacagttacttcccggccattgcgaggaacccattgcgccatgactgtcaatctggatgacgaactgttcaccagtgccatctccggataccacgaggcgtttttggtccaacactcccacctcccggaagatgaacgaaatcagctctggattgaacggctgagtcagttcatcccgaccaacgaccgggattccaactggcagccagctgggagcctggggaaacggaatcgacaggatgcgacaccacggacgttgccatgttgtgatttgggtcttcctcaggcaaaacggagagccaccgtatgtgtgaccttggttacttgctccagccttctcctcgcgctcgcgtctcctcacttcaaccgccattcgtccttggattgacaattggcagaccccggatctctcagtcgattgcccacgcgacctctcctacgcctgccccgcagacccacctcggaacggcgctgccttcgcgggacaagactcctaccgacacacgccgatggtgcgctcccagagccagcaaataccggtctcccaccagcaccaccccaccggtgccgccataggtaaacgtcaatccttcggcctggtacggacccatcgcctcgaccatgtcgacgaattttcgccatccgatttcgcaaagtatttggacgttcctcccagtcaaccctgtgactcggcgttgactttcggactcgcaaatcatggacaacccggacctttccctcaataccctgaccggacgcccccctggaccgaccaggccccagcagctgcgccggagatgtcccgcagcacgaccgccgactccttagttggtggaatcaacatgatccgcttcgactcgaccggaccagctcagtatcaagaaccgaccgactccgtcccgccggactgggtgcctcctacctccggcctgccgtatcaagactcctttctctcccccgtgtaccctgacctagatcccacatcgtcttccccattctcccattctcccttctctcacccatcgtccttctccaacctaccattctcggcatctgctcccccagccgcctcctctcgctacccaatgccccacaatcgcctcctcttcgactgcatcgacggccataccctggcctcacagcgctcccgggctgtgcgacgcaccaaagagcaaatcgcccaagccacgcgccgcattgctccaaaggtcgagtctgtcgccagcagcatgtcccagatcgataaccacaagatggtccgcatctcctcagcagacggcacaacaaaggaagtcgccgctatccccaaggcctccgtgcgacgaccgccacgaccaaagacatactgccgcatctgcacggaccatccggacgggttccacggcgagcacgagctgcgccgccatatcgagcgcgtgcacgcttccgtccgcacggtctgggtctgccgtgatatctcgcctggcaagtacttccttgcaaattgcaaggcttgtcgcaatgggaagcgctacggtgccaattacaacgcggctgcacatttgcgccgcacgcatttcaatccctgtgagcggggccgcgggggccgcgggaaagatagcgagaagcgcggcgggaagggcggaggtaatcagcccggcatggatgttttgaaacattggatggttgccgcagaggaagtcaccgaggcggctggcgatggcaccaactcgaagcttctgattcggaatcccacgcatctttcgactagggaccctgggtatcaacttgctgttgctgcttgtggcctggttgagggtcagcctccttatgttgtggagtccgctccgctgaaggagtctgaccaattccccgagtttcccgatgttccgtttgagttcgattttgagatggatcttgatctcgacctcgacatcgatgagtcggaagattcctcattatccggttcgcaggcatcctgcacgcctgatactgattcatatctcaagtgagcaatcgtagtctgcttcattttgccactgggtttttttacgacagtttgtccaaagcactgtatgatcgagttcgtgtactgtactttgggctgtggttaatggtctctgggatttaggggttcgatcttttggctttatatcttgtttctttggcgactttgtatatcgtgtgatactggcattggcattcggtggagcgttcggtggagaccaattctcacagggcgtactgacagtaagaaggtgatctttgataatcaatggcacttgcaggtacaccgttgcaattgtattcagccctgtacttgtagcaggtacaagcatcagagtgttgcgtggtatgaggatgcaggtaccgggtactgcccaggcagcaacaataccggcggtgagtgccaagagtcagacacggactgtgagtggctgaccatcgccgggagtggagtccggtgtgacccggtggccgatcctcagccaatggaatgccgcccaagggatgcaattcgtggctgacggcctttgttggcgatagggctggcagaactgtggctggtagaacttaggtgatactgtggcctaagggccgatgggtatgtctgaggtactgcgatgttagtaatccgattgttgctagttggaaatagaagtattcgcctgcaaatgtctcaagcaccgagatagaagcaaaaaaaggccaagaatcaatatttactagcaaatcggcccgtgtggagaagcaggggaaaggaggagagacaaaaaggtacttcaaaggtacctcagccctggagtcttggcggccaaatgcccctatcgggcgcaccggtcaggtacctctcaagtaccccgacaatttccttcttacctgcaatacaacctcgagaaagtaagttgcctttttctcctttctgacactcttaatctcacatcttcgcatcttcaccttcatctctttccacctcttcaatcgcttattttggctcatcacagcctccccctttcgaccaatctctgtcttcgccttatcccaggtacgtggatttagctgctgtggtagccattcatgcaccgtgaccctggtctcatcaaaggcgccgcaaattttgatgttgtataatgttgattgtgatcagtcgctgattcgttctacctcgattttagaagattacctcccgctgccatgtcttatgcgcagcagcagcctccgtatgggtaccagcctggcgctccgcaaggatatggaccccctccgcctggccctcagccggggtaagtcagcacctatcagcccagaactcgattttcgccgtcttgccaggaccaaccattggcgataccgaaaccgagaccgatcggcttctgtacgctttgcgaccgcaaaacttgtcgcctggtctgcggcgagctcatgtcttggtcaatactttggacatggtgctgatcaacttgcaaatgcagatactaccagcagcctggatatgaccagcaaggccagtacccgcaaggccagtaccctcagtacgcccaaggccagcctggtggagtaagtgttgacaattaaccacccaagccacacacacttaccgataaacagatgcaatacccaaaccaagctcctcctccacctcaacagcctcaagaacaaaaatctgaccggggatgtctcatgggttggtaagtaaccatattgtcggtgaaggtgggaacaacactaatctgagctcttttctttcagtctggccgcgatgtgctgttgcttggccctcgacgattgctgcgaatgctgcgacgagtgctgctaaactctatgacccatgacatcgacgatacctttcttcttgcaggcgttgggatttttcgatatgcccacaacattccaggacagaacactgcgctttctgaataccaataatctcctttgtgtctgttgcattgggctttcattgctctgggagaaatactccagtccggtcaattctagctttaagtattcgttcattgcgttcaagagtttatttgagatcttacaacatacataattatccgttgctcagatacatgcgcgtatgcattgaaatgcactcaagatatccattatcacattggatatatccaaatattgttacaccatatgccgacgatcgtctaatgcttaatctctgtttttgtgctcaaactggcgatcttgaactttcaatagtctcaaagtatccattcctgtcaagctgaatgcttgacaaatcttgtgtctgttggaactggcgatcacgcataagtccccacgaatgacaatttgctcaagtttctttcaaagacattggtcagaatggcgactaaaccccaagctacccagcgtagcttcatggcccgataaagcaatgaggtaaagggaaaacgttaccaagcatcgaaccgaaagaatcgccatctggcaaaacacagattgccttgaagctacgtatcaaacaggagagatctatctagattgtgctattttttggctttctgcggtggatatggagtctccaacagacataccagacggtggccgatcagcttgcaatcggccttcgcgataggatgtaaagagccgtctcagagatccctgagcaggccaaccgctggacgatggctgttaattcttgataatgccgataatattgatatgtggattgaaagcaagaattcaacaactggagggttcaaaaattacctccccaggagtgaccaaggcgtcatcgtcttcactacagagtactcgaagcaacaaagtagctcaacatcttacccaacaacgtcattcgaattcccgaaatggacgagcaaagagctactcatgtattgcgcaactccttgattgacaaggaattcctttacgatactgaaaatagcccagagcttctcgagcaattgacttgtgtccctttggctagtgtgcaagcagcttcatttatcaacgagaacagcatgacaatcgctagctatgttaagcttttagtcggacaagagcagagtgccatcgatcttctgagccaggactttgaggtcgatgcaaaagcattcgaaaccctgtcgtgaccacatgggtcacataatttgagcgaattcgacgacaaaatcctcccgctgccgactatctctctctgctttctggcctgtatccaaagagaaggatattccgatattgtcccttccgccggcgtccaatgtcgaacagaaaaaggtgatcggtgttctcagctccttttgctttgtacgtgccacgcatgaagattcttgccttgatatgcatcgcttagttcatcttgcaagaaactggctgcaatcagtagacatcctccgaaagtcaattggatggtttacgtgggctagatgcctggttcccctttactgatgtggcagattatgagccagtggtgagtatgtgtccctcatgcactccaggtccttgatctaacggtaggagaggacccatcttccgaggatgcgtttttttgttcaagttagccagatgtcaaatgactgatcgaagatacaaagaagctagaaaacttctcaccggggatgtcaaaatttcagagagaatttttgggcccgaaagcgcatggactatttaggatcttgattgggtggcgattggctgttcatggcaagggtagccggagaaggcaatcaaaataagcgaggactggaaaaaccgcagaagagacttcaatagcatccaagctgtccgggctctgcaccggtatcggctatgtacacgcttttgaacaccacaagtctgcagagctttgcaggaatgttatcccacatcatatcaaagcatttagtgtgggctcatttgagacgactgatgctataggttgcctgttcatggattgctggtcccatggatactcttggatgtgtcagagctagccattctagtactgcatatctacagaaaggtcatcggatcggccaatcccagaacggtgatggtcatggtaacaatggcaagtatatatacggacggatggcagcataaaggggccggatcattgctaaccgaggcccttgagatccaaattccattattggatgtgagtatccctcaattctccagacaatggcgtacggatcaactacatggttgtttacgcaaagatgcagttgccccgagaaaaggtacgtccggtttagcgcgcaacgctatggcttagatcacggagttactcggctcaatacgtatctgtggagcagtggatgacgaagtcgaagcaagtttctcgttgctgtactccgctgatacatgcactaaaattgtggtacaagagcattcaattccttcatgggcagatgtttttctcgtgtttaggcgaatatgataatagaccgaagaagcccttacccgaaagtcaaggtgtatggcctctattatgcgtggcagccaagaaatgatctcctcctgcgtgaaatccaaaaagccataaaggatatgcccgcaaacgggcagatcccgagtggagaactcagatcatcagttgaaggtcagcaagttaaggaatcctacgacagcatgatctcgacaagtctcccaatcatctttaagggcacaagaacttagggtcttctttgtatgactgtcatacattttcactgctctcaagtgaacctcatcctgtaatagttgaagatacgaatgtaaataggaagtaaaatatatatttcgtggtatataaagaagtcttcaggcgagttgcttttatatcttcggagtcgccgctgctctcgagccttgccggtcacataaatccttgtcagccactgggcagcaagagccaattatgtaattcaattaagtaaccttccagctggaaccagaagaccaaaatagtcggccgaacttgcgccgtttctctttgggaataacacaatccatttagctcgacagcagtctttttacttgtccttttgctatatatcgtctcccctttctcacgttttctatgcgtaacctttgaaatttcgctatgaccgcgttctccacccgcgagccgtcggacggtcaataagtagttagcctgtgatccgaaattgtttcctaaacgagggctgcgccgagcgctttgctatattcggttgccacaccccgaaccaatcttgatttgcacgactctcgactctgattcatggagattttccgagtttataaggggtaatgggcccgtggaccaatcagcggcagggaccgttggatgtgccgaccactttcattatcaatctcccaaccaagcgagacaaatgaggcaattccatgattcatgaccggaagacgagggagtatccacagttaatatggattcttgcagccaagaggccaagcgaagcttgagaccgacgctgcaaagcttattgtggtcgacgcttacccgctcgggcctagcgctcgctagataagatgagggcgacatctgattagatctgccctgtttcgctgtgatttgccggtggggcaagccctaggctagcagccctggaatgcgctgatgagtggatataattaatttcaccaaatcaccgctagaggccaaaggccgattttgctatgcgggtcacgacaccgcgtgtttttttcactgtctcggtgtcccatccgaactgtgccgatctcgggactttgtatactataagtgcaacgggcgccccattatttccaatcttgtactgaacgcttgtttaattttacctcttcaatatgggcgtccgtcttttgatccgaagggcccgaacggtcttcagccgtatggcggcctctgacgctgcaagctcaaccgacatacctcccccagcggatggaatccaaccaagcaagatagatcctgccaccgacacagaacttcaacaggcggatatgccgggggaagacctccaacatggtgtccgcgatattgaggccatcaccttgacctggtccaagacaaccttggctctggtttttatcaagtaagccgtttccctagacaatagttaagcttgaacagttgctaaagcagtcgattatagtatctggttcctatattttgtcaacgccttccaatcttcagtcttctccagcttgagcccttacgtgtccagttccttctcggctcactcactgtctggtgtgcctgttgcgcttgccgatgcttttgcggcagcaagttatatccccgtcggaaagatgatggatacctggggccgtgcagaggggtttttgctgatgacatgtttcgctacactgggattgattctcttggcctcttgcaacagttttgccatctactgtactggatatgtaagactgccatttattctgagatactcctcagaacgaacctcctttgcacatacttacggtcgagtactaggtcttttacaatctcggattcagcggcatggaatactccattgatgtggtgaccgccgatgcctcccaactgaagaaccgaggcctcgcgtatgccttcacttcttcaccatacattattactgcatttgccggagcaaaggtagcagatgagttctactaccaggtcagctggcgatggggcctgggttgttgggctatcatcttccccattgtggcggcgcctttgtacttcatcctcaagaccactctccgcaaagcggaaagggaaggtcatcggatcaaggaaaaaagtggtcgcacatttttgcaaggtgtctggtattggactatgcagtttgattgtgagtattacctttctctatcatttcggtgcacatatcccgccggtcggacattatcgacaagacttcccaatttcaaccatttacttcttcaaacagacactaatctcgaacagtgcctggtgttttcatgtttactggtggactagtcatcttcgaacttcctttcgatatcgcaagtgaagcacccaatggctggggctcggattatatcatcgccatgcttgctgtcgggttctcgatgctctttttcttcgccatctacgaaaattggatagctcccgtgcctttgctcaacattaccttcctcaccgaccgaaccgttgtcggtgcctgtcttctggatgccacctatcagctatccttctactgctggaacaactacttcacctccttcctccaggtggtcaacggcctaacgattgccgaggctggatacgtgaataacacattcgatgtcgtgtccggtgtcttactcttcttcgtcggctgggctatccgaaagaccggtcggttcaagtggttgttatacatctctgttcccctttacatctttgctcagggattgatgatctatttccgtaagcctggtatgcgcgtcggataccaggttatgtgccagattttcatttcgatcggcggttcgatctttattatcgtcgagcagatttctattttggctgccgtagatcatcaacacgtcgctgctgcattggctttgttgaacgttgttggtactatcggcgactccgccggttacactatttgcacagctatctggactaataccttccccggcgctcttgcgagatacctcccagcgtctgaattgtcaaacttggacaacatttacgaagacatcacagtgcagactagctatcccatggggagcgaggtcagactggctatccaggccgcttacggctattccgaagtcattatgctttcggttggtgtgggtatcatgggtctggccatcatttggaccatgttgatcaaaaacctcaatctcaaggagatcgcccaggtcaagggtactgtcttctaaggatcctttgagatagcaatggtgtccggttggatatctggctgtgcgcatcatactgttcccttcttccatgatccccgggaggatacactcgcagcagcaatcactcattatcgctaattccctgatgtttcttgttttccgtttgttgtctttttcgtctgccgatgtctactcccgatccggggggaaagcatggccatattgtccacgatttactgaatcagatgttcacccataacttgaagtgggacagctggaattgatctttcaggcggccatttcaggatagagaaagatcaggtctgatcatgattacctttcaatgtacaaataggttgataccacatccatatataccaatgtcatggaagaccagttgtttatccaagcgagattattatttgcaagagctttacatgtacaattaatactacaggaatagggtctatcaccgatatttctgaattcaatcagattataaatctttcatacttggtgtagctaactaccactctaccaccattacgtataacaagcggctattctaatcctaattctcaacactccaaccccctttttattcgcgaattattagctaaatgtaaagctgcatagaaattttctgcaagacacaatggaaacatccaggagcaggcaaaaaaccgggggaaaggcacagtccggggaagaatggaggatctgcggagaaaggctggatttacccgtcaatcacaactcacatcctcagtcatggccgtgaccaactacccctcaactgcagccaaggtagacgcgtctcttgtgcggtgctcgctctcgaatcaacacgaagagccggaaattacttgcaggaataagcctcggcacctttcctgccaagatgctgcagcggtattgcatcgcccacgcaaggaacacaccattacgacacacgttggccttactcgcaccaaacctcccctaggcggtgtatacatattgcatctgtcttgatccatgcacccccgtggagatttacctcattgggaatgaagtgtcggtattgcggtcgattcggcagattgttttgtgcaaaggaagagatccagtcatggccctcgaacccctcatggagatttacttcattgggaacaaaacctcggtcttacagtaggtgtcggcagatgttctgcccaaaggaagacataatgttatgacccttaggtgtcacctcgatccatccgggtcaattggagtacaatgaggagcgcaggtaattatccggcagggcactcctcgctgggagattgagcttcctccatataaatatccgttacagcgcgcattttactcagactccctgaatttcaaatagcattggctaattgggactaaacacgaaaaatgctgcacaaatatcttcttctgccgcttttggcgtcatatggtgccgcggtcactatttctgtagcaaaatctggaggcaatgctacatcaggtctgcaatatggtgcaatggaagaggtaggttgagcttcgtgtcaattgttatcggatctaattcaaggtttaggaaatcaaccattgtggcgaaggaggtctctatgctgaattgatccgaaacagagcattccaaggaagtccaaagttcccttcatcattggacgcctggtctggtgttggggactcatcgctgtccctaaagaacctcactgacccactgtctactgcccttccaacttcaatcaatgtcaagggtactggcacaactgggttgactaatgcgggtttctggggaattgacgtccgtcctcagaagtatactgggtcattctatgtgaaaggctcttactcgggctccttcacggcttctctcctctcgtccagcggcgaagttttggccactactaagattgcttcaaagagtgttgcagatgactgggtgcagcatgattttgttcttactcccaaagcaaaggcttccgataccaagaatacgttctccctgaccttcgatggctcggtaagatttgggataggggacttgctatgcacctcggctaattccatctagagcgcatcgaatggctcacttgattttaatctgatcagcttattcccacccacatggaatgatcgccccaatggcatgcggaaagacttgatgcaagccatggccgatatgggccccgtaagtcaaaatcttactattgccttggaaaagcccaatgatccgggatgctaataatcttgatagaaattcctccgcttccctggtggaaataacctcgagggtgacagcatcgacggacgctggaagtggaacgaaaccattggaccactcacagaccgacctggtcgcgcaaccacttggcaataccaagagacccttggattaggcttggttgagtatatggagtggtgcgacgatcttggaatggagcctagtaagtacattattttgccatattttgcctacatagctgacaaaatatgtctagtcctggcggtttgggctggactcgctctgaacggagaagttgtccccgaggcagatctcgatttctatgtgcaagatgccctcaatgagatcgagttcttgactggctctgttgataccgagtacggcgctctgcgtgccaaggttggacacccagaaccctggacaattcggtatgtcgaggttggaaatgaggatatgctgagtagtggtctggcatcgtacgagtcctacaggttctcggccttctacgaggctattacggccaagtaccccgatatccaggtccttgcatctactatagatatcacgattcctggaaatgcaggtggtgattaccatttgtatgatgtcccggataacttcgtcagcaagttccacatgttcgatagttatacatccgagcatcctattttgcttggtaagtcaataagtatacctgcgagatatgaactaacacacatcaaggtgagattgctgttactgagtcaaataacggagttggcattgactggagcaacactcatttcggtctgtacccttggtggatcggctccattgccgaggctgtgttccttcttggtgctgagcgcaacgcagacgcgattattggaactacctatgtgagttgtgtcaacttaagttttagtagaagagaactgacaaagcaataggctcccttcttgatgaacttggacagctaccaatggtccccgaccatcctctcgttcaactccgatcccgaccagacagctcgctccactagttggcacctgtacaccgtatgttaaactcttatcaggccttcaaagtaacatccactgacatgagatgcgaaaatagctgttcaaccacaacctcatgacaaacaccctcccatccacttcctccgacgacttcggtcctctgtactatgcaacaggtctgaacagcaagaccaactcgcacatcttcaaggcagcagtatacaacagcacatccgatgtgcctgtatcactgaccttcgagggtgtcggccgtggaaccaaggcagacttgaccatcttgactgcgccagatccattttcggtgaacgaggtgggcgggacgaatatcgtcaacagcaagactacccagattaaggctggcaagaagggcgagttctcattcaagctaccgaatctgagtattgctgtgctcactaccagttaatgtatcgtcaatattctaggatgtttgcgtatgcagagcatgactcaaatatattgccttccggtttccgggcttaacggattactgtatatggagtagattttcgtcagactgaaagactcagccttgatattcgtattctaaaatagccattttctatattctaagctatatccttccaacatctaccacctgtctgtcacattgagtaccggcactctgggctatgcaatcaccatgatctatttccgccagttaccacctctatgtatttcttcggggagtccctttcccgacccatgcgagttcggggccgcgtatcaatcgatcaatcgtgtctgcgcgaggcgtgtgttgacctcaccatgaacaccacgcctattccctatactcccttgcggggctcattcgggtgcgggtgcatgttcgttacttgccgcccgcacgctccagaccctttccgcgagtgaagattgcagcgacggtcgcgatgaatgcaaagatcgcggaggccatgaaggagagtctgattccgcggtagtacaccagccgagcggctaattgcacatccgggggaagatcataaatagccgagactgagtggcggatctcatcgatcacctaggagggagcgagtatattggtcagcaaggcttattcagcggctcgttatcatcaaacggcgaaggaattgtactttccatttgtctggtattccactcaaggcctcaccgaggcctgagttaagtgtattctgcatgatggtggaggtcactgcgacgccccaaacattcccgagggagcggatgaggtagacggttgaggcggagacggcgtgatctagatacgatattgttagcaggcttgcttggcaaatagctcggtcgctcgctgatccgggtaatgggctagcgacaaggatagggaaagtgccttaccggcgtgatcaaaggctgctaggaatgtgaacaggatccctgggtacaccatcccctgacccaggttggcgggaatcacatagacgagatacttccatcccgagtcgttgaatcggaggagcatgacgagcacattgccgaagagcattagggctgcgccgacgcgtacaatggaggataatctgccccagcgcgacatgatgattcccgctataagaccacccagtggggtgaatagacagggaatcaccagtcgggtgccagccttgctgggtgagtcaagaaggatcacctggaacatgagagggagagtaaatagatactgaatgattcgcgttagttacgatgctcataatagtggagcgggtgagcttactgcatatgctgccatcccgacacaaacgttggcaatctgtgtggatacagcgagctgtcctcgtagcatcttcaatggaatcagaggtgcagcggtggttttcgcttcaacagcgacaaatgcagccagcaataccacgctagagaccaatggcagaattacccacaggtgagtccaaggaagaatgttaccacccaggctgagcccgaccagctgaaccgatagagccagaatgagcagacaagcgcccagaacatcgatttggtgccaaattcctcgggttcgaccgggggaggattcagtgtggcgtgttgggaactttagaactacatagcccatgaccaatgcgaacaaagagactgggacctgcagcaggaagcaccagcgccatccgatcgagtcaacgatggcacctccaaaagaagccccacagatagctccgaagccgtacgagacgttctggattgcctggtacatgccgcgttggcggaagggaatgatatcggagttgatgattgttgctaggatgcttgttagtgagtgatatgtcaattgaaagatcatcgacttacccatagtcatcaatcctccgcctccaatgcccgtcaaggcgcgcatgatgtttagaaagattacatcgtgggccacagcacatcccagacaaccagccatgaaggtgatggttgcagtgaagaaacaagaccggcgaccgagtatatcggagaatcggccataaagaggctggaatgcggtgcttgtgatcaagtacgaggtagttagccacgaagcagtgttcgcggcgttgaactcggagctgataacagcataggttgaggcagtgatggtgccgtcaaatccgccaagaaacacattggccatgattgctgttgattgttagattctgcttgatcgtgtatatattttggtcgaacttaccgatttggatcagtagaaaccctggtggtgggctccaagttgcaggaactggatccgatcgcaataaaggttgctcttcgctttcttgtgctgacgatctttcgacttcattctcgtgcggcatcacgccggccgaagcactttcattcggattcaatgccattgtcgatttcaaaattcagaccacagatttgcgattcagaagatgacgaaggacgaaagaagggcctggccgaatatcggaaacttcagagatttcagacgcgcttgatcgggaaatgcgagcggattatcttctatcttccccgccaagtgccaagcacgacatcgtattccactgtgacatgatcaccaactattttaacgagatctgatggatgtgggcgattttttcttctcttctctctctacacaactattcaaaccaaagaagtcaaagtgactcagtgcagagtacccatctaaggttaatgtaccctatcatgcacgaaatgaccagaatcatggaaactgattgctggaccagtacttatcatgaagctccttgaagccgttgcctacactgcagtgctgttgccgctggccgcagcagactggcagttcaaatctcgaaccgacctggccccgcctcgtctgaacatcaccatcccggcgacaaaggatgtcgagaagggttacctcttcatcgcacctttcccgggccagtgggctgagccgcagtttcatggtccgcggcaggaagctccgtatattgttcgtgatgatggtgagctcgtctggtcgggttatacctacttctccatctgggccgccaacttccagaaggccagatggaatggtcaggatgtgctgttcagctttgagggcgatcataacccggcctatggacatgggcatggtcatgctaccattttgaatcagcgctatgagactattcgagagctccgcgctggtaatcacaagcttatggataagcatgaattccatgttgttgatgagaaaactgcgttgcttcaggtctatcagcctgtgccgagagatctgtctcgctggggtgctagtgccgagcagcagtggattgttgatgccatcttccaaggtatgtttgtttcagaatatatgaagagttgttgctaattcgcagtagagttggaccttaacactggagaactgctatttgagtggtctagcctcgagcatgtttcccccgatggtaagtcaattacctctaacccttatggtggactggtctgacatcgtacagaggcggtcctccctctcaacccgggacaagcgggtgcaggctataactcatcggacgcatgggactacttccacatcaactctgtggacaaggatatcgaaggaaattacctgatttctgcgcgggatgcttgcgcagtccataagattaacggtaccaccggtgagatcatctggcggctgggtggcctacgctcagactttgagctcggtcccaacgtcaaattctgcttccagcatcatgcgcgctttgtcgagcagggtgatgatgaggaggtcatctcgctgtttgataactccgctcatggaacagagaatcatcgtggcaaagaggtccacacccatcctttctcgcagggcaaggttatttctgtcaacactgccacctggactgcgaagattgttcaagccttccaacctcccgatgggctcctcgccaagtcccaaggtagcactcagcttctgcccaacggcaatgccctagtcaattggggctctgagggagctatgaccgaattccgggcggacggtactccgatctttcacgcttacatggactcaggactgctgggcgagggtgtccagaactaccgggcattccggtacaactggaccggtctgcccacagaagagccggccatcgtggctgagaagacctcctccggcatcgaaattttcgtttcatggaatggtgacactgagacggcggtttggcgattctacgccgtcacggatggatttggttcccgggagttcttgggcgaggctacacgtgatggatttgagacttccttctcgcttcctggtcactcataccaacgcttggcggctgaggctgtctcggctcgtggtcgtgtcttgactaccactcgtgctactcgtgtccaggacgcggtgctcccctacggtagtgttattgcggggtccgaggaccgcgactcctggagagagttgattttgcaggcatagatgaagacaggtctgtgtactaggctctatagggagttgaatgaggtgcggtgaggagcatagagtagtttggagcagtgtcacatgatcttatcatctttttacccttgagctttttgttctgtgtaattcattagactttggtatcgcagtatagcgaccactgcgagtggtattgtagctgaaaataagatattcatgtcggaatgcatctacaatggcgaaagggtatcgtctatggtatagtctatcaggtatatactacatactctcggatgctcacaactccgagccaaactcgtatattggccgaatccgagatccattaaccgaaaagggaagttgctatgaaccgtggaatataaggcgtgagggtgaggggtccaatgctactacgcagccaatcaggaggcgggaaaacaccttaatatggaggttatgtgtatatactatcgagaattaatgccatgtgacatccaaatagagattcagagatgggaatattcccttattcagctggcatggagatgttcatgcagtgtagtacatgaatcctccgtttccctccatttccggaaagagctgagacggtccatccatggatgttgcggcttttccctctttcctcttgaggattctcgggtctgtcactttccggctgccgtcgttctttccttctgtctcttgtcatcttccttcggtccttcgttccttcttctcttcttccttcctcctgccatcctttctatcaacactcatctgtcgcgtctcacattttgtttttctcttctgtcaacaactctcgtttaccttcttgaccgtgtcccttcatggcttcacgtcttcttccatctttgggcttttcgccgactccgctcatgccagacccgatggaaaacgtgtcggacaatggtgccgttgatacccccggggtgaagaccccagtgtctgagctctgtgatgatgatcgcgacgggcaaataaccactcttgcacgttctctttcacagatctcgcgacagggcagtggcaaggccagtgaaacctcagagggtgtcaacactttcctcgaccctacccatgatccagagctcgatcccaatggtgaccagttcaaatcgcgtaaatgggtgaagaacttcatccagatgacctctcacgacccagatcggtacccgcgtcgcacagcaggggtctccttccgcaacctcaatgttttcggctatggaaccgcggctgattaccagatgaacttcgccaatttctggctcaaaggcacaggatggtttcgcagtatccttggcctccagaagaaagtacgcattgagatcctgcgagacttcgaaggcatcgttcacagtggtgagatgctggttgtactaggtcgcccgggaaggtatatgaatcgacgctccccgcgaaaaactaattactaacggccaaaagcggatgctctaccttcctaaagacgattgccggagagacacatggcctctatctcgataaagagaaagggtccgaggtacagtatgaaggaatgtcctgggatcatatgcacagccgtttccgcggcgaggtcatctaccaagccgaaaacgaagttcatttccctcagctgacagtcggtgatacattgctgtttgccgcttacgctcgagcgccgaggaaccgactgcccggtgttacacgcgaccagtatgcgatacatatgcgagatgtggtaatggcaatgcttggcttgacccataccatgaacaccaaggtgggtaatgagttcattcgaggtgtttccggtggggaaagaaagcgggtcagcattgccgaaaccactctatgtcgctgccctttacagtgttgggacaacagcactcgtggacttgacagctcgacggccctggaatttgttaagaacatccgcctctccactgactataccggatccaccgcattagttgcagtatatcaagcgagtcaatctatctacgacctctttgacaaagcgattgtgctctatgaaggccgtcagatctatttcggcagtgcgcccgatgcccgacgcttctttaccgagatgggattccattgcccagaaagacaaaccactgcggactttctcacttccctaaccagcccttcggaacgcctgattcgcccagggtttgaagactccgttccacgtacacccgatgagtttgcagcacgctggaaggacagcccagagcgtaagcagctgcttgctgagattgaagcaaacgcagccgaaaacaccgctagagaaacaaaggttgagcaattcagtcgctctcgtgcagcagacaaatctaggtttactcgtgcagcctccccatacaccctgtcgtatccgatgcaaatccgcctctgtctctggcgagggttcttgcggcttaaggcagacatggctatgacgctcgcgactctcattggaaataccagcgcatctctgatcattgctagtcttttcttcaacctagcgctcaataccgacagcttctacaagcgtgcagcattacttttctttgccatcatgattagtgccttctctagctcactcgaaatcttgatcatgtggcagcagcggccgatcgtggaaaaacattacaagtacgcagcataccatccctcggcggaagctatcagcgcgtggcttgtggaaatcccatcaaagcttttactggcagttgtattcaatttgatcatctatttcatccctcatctccggcgaactgcacctcatttcttcatcttcttccttttttcagcaatgacgacgcttgtgatgtccaatatcttccggtttatcggcgcaatctcacgttccgtggcccaggccatgcctcctgcttcagtgttcatgcttatcttggtcatttatactgggtttacaattcctgtccgagatatgcacccatggttccggtggctcaactatgtgaaccccattgctgtaatgataacttagcttttgttaggccccaccagaatatgctaacacgagacagtatgcctttgaggccctgatgatcaatgaatttggtggccgatccttcccatgctcgaactttgtccccggtggcttggaaatttacaacaatgcgcctctcagctctagaatttgctcgcagaagggtgctgtggcaggccaggatttcattgatggagagacgtacattaacaccacttacgaatactacagcccgcatctgtggcgaaacttcggcattctctgcgctttctttgtgggcttctttgtgctgtacgtcttctgcagtgagctcatccgcgctaaaccatccaaaggtgaagtcctggtatttccgcgtggtaaggtccctgcttttgtcaagaatgttcgaaatgaggatccagaggaagtcattgcatcagagaaaggtgcagttgctagcgaacctcaggactcgaccgcagcaattgttcgccaaacttccatcttccattgggaaaatgtgtgctttgacatcaagatcaaggggaccgagcgatgtatactagatagcgtggatggttgggtcaagcccggcactctgacggccttgatgggtgtcactggtgcagggaagacatccttactcgatgtcttagccaatcgtgtcactatcggtgtcgtctccggtgagatgcttatcgatggccggctatgtgacgattctttccagcgaaagacaggttacgtgcagcaacaggatctgcatttagagactagcactgttcgtgaagctctggttttcagcgctctcctacgccagcctgtcaccattcctcgccaggaaaggatggcatacgtcgaagagatcattcagatgctcggtatggaagaatacgcagatgccgtggtcggtgttgtcggcgagggcctcaatgtggagcagcgtaagcggttgactatcggtgtagagctagcagccaagccagatttgctgctattctttgatgaaccgacctcgggtctagatagccaaactgcttggtcaatctgtactctgatgcgtaatttggccgaccacgggcaggctgtactgtgtaccattcaccaaccttcggcaatgctgatgcagcagttcgaccgtctattgtttctcgcgaaaggaggacgtactgtgtactttggcgaccttggcccgaatatggaaacattgatcaaatatttcgaagacaaagggtcgcttaagtgtccacgaaatgcaaacccggccgaatggatgctcgaggtcatcggtgctgctccaggttctcatgcggatagagattgggccgagcaatggacgaacagtgccgagcgtgcagaggttcacagagagttggctgaaatgaaaaaggaattgtccaagcagcctgtaccccttcgcattgcagggtacggggaatttgccatgccactctggtatcagttcctcatctgtactcaacgcatgttccagcagtactggcgatctccgtcgtacctatacgccaaagttctcacatgcactgtcccggtaagttatactcctccattttatttgattggactaacaggtatagccactgttccttggattcaccttctggcatatgcctaccagcctacaagggctgcagaatcagatgtttgcaatctttatgcttctcgtcatcttcccgggtctggtccagcagatgatgccgtcctttgtcacgcagcgttctttgtatgaggtacgcgagcgaccttcaaaggcctactcatggatggcatttatgatgggcagtatcctcacggagctggtatggaatatcctaatgtcggtgccaatctttttcagctggtactacccaatcggattttatcacaatgcagagcccacgaatgcagtcatcgaacgaggcggcatcatgtacctgctcattctgcagttcatgatgttcacgtcgacattcagttctatgatgattgctggaattgaagagcccgataccggcagcaacattgctcagttcatgttctcgctttgcttgatcttcaacgggtaggctatctgcgggtatttggtaattaattggtaatagttctgactggatttctagggtactcgcgaaatcttctgatatgcctcgtttctggatcttcatgaaccgggtgtctccattcacgtacttcgtgtcgtcggtactctccacaggcctgactgggacttcagttgaatgttctagtattgagtggctcactatctcgcctccagatggacagacttgcggccattatctggacccttacatcaaggctatgcatggcacattacgcaatcctggggcgtcgaaggattgccagatctgcccaatgtcgagcacagaccagttcctcgaaagcctcaacatgccgtattcggatgttgggcgcaacatcggtttgctgtttgtctacgtggggttcaatattgtcgccgcgctcttcctgtattgggtcttccgcgtccccaagcattggtcgcgcaaggccaaggagacctaagaaggttgtcttctttcttcttcgggttgtggggggtggttatggatgtcggttctattcccgagtttctactcggcgttcatattctcttactctgttgctcctgtcacagagccttatcttgtcgaatgtatctcatacatgtagcttatgttaatgaattctgtattattttgtaactttttgcgcacgagtatccatcattgggacatttctgtgggcagagatgccatttggtacttgtcaataggaaagcagggcaatgggagatgggcgagaatagcattgtcaatccttttacaattctctacatcacaaagtcttcgtcgtttgatgacttgtttcttcagcgaataaatcccctcttccatcttctcctgtcatacgcgtgacttgtcgagcttctctgacacgaaaaggcctaaggcattgcctttgcgttctttcttggctttgccctttcttgactttgattaatcaggggtcaggttcgtgttctgggtaatttgctccgacttctttcgcacactagcgtcgtattgtttatgcgcataagtacacatgttcaaggtctcactcttctcttgtcagggatatctcatggttgtcttgtgagacaagcttcttctatgatactgagtcagaatgcaagcctcggttaatctgtccctggtgaacttaccgagtgcgtccaaggttctgtctatcatgtaacatccatgcgacaacataggcaatttcctgccacagaaactcgggacgagcatcacgatctcgaatcatcggtctgacttcagtaacggcgaacgtttcttgggaggcgtcggtctcaagagatcatggtattttgatcttggatttcctgaaagtctgtttgttagccagcttaatcaccatcagctagtccagtctcgctagtgtgaaatgacctcttacccataatggacttcttctagtccatacttgtggatttctctcttgtacacggcaaaggggagtgatgagaggttgtgaagtagaagaaaggtcaggggtgagaaaggttgagaagtgaaagcaatgaagaggagtgtggggatcgaatcaactcaattcagtacttcaagttcgtatagctcttttatgaaatgctgaagcccctggccgtccacgcaatatatatctccagcaaaagtcaagatacaccctaataccaatcaagcaatgcgacttggccattcagttaataaaatcctctttcatatgtactggaattgaataaccaaatatctctaaaagatctataaaataaatcgaaagcgacgattgggttggccggtccccgcttatcgacgcggaatcaacagtcttctcctcctatccccgcgaactccatgccaacacctacttttggtcctctgtacaacctcagtcatagtcatacagctcacacaattcgccggaatacctcgagagataccaatagcgccctccgccccttgcttctccggccgcgctgtccgtaccagcgactcaactcaccatgtacgctccatctgctcagtgaatcgctcagcaactaacatgccttctaaccccaggggcgtcttctccctgatcattatcaacaaagccgggggtctcatctaccagcgcgagtttcaatctggtttgcgcaacctctcgacaaatgactacctcgtcctagctggaacctttcacgggtaattcaataccatctctctcctggaatacccattgactttgattctatagcgttcacgcgatcacccgctccatcacaccgaaaattcccatcgcccaacctgctccctctacaacctcaacgggcaccgccgctcctgctgcgtccggttactcctacccaaaccccggtgtaccagtctccggcttggattacctcgagaccgacaagtttcgattgacatgtttccagaccttgacggggacgaagttcttgttgttcacggatccgttgacgggcggcgtggacgcaatcattcagaggatctatgagctctatgccgactatgtgatgaagaatccattctatcagattgagatgccggtgcgatgcgaggcattcgatcggcatctgggcgcatggttgagggggaggacatagccccgacgcgccacgcggatatcatgactttacgaactagatacgttttgttcttgtacttgtgtccggatatcactccgtctcgtataataccaaatcacataatatattgcccttgcacactgtagaacgtacccgcagaaggtcgattctcgagaatacaagacaaaaacagaagcaaacgccgggtatgcataacagtcatattcaaatcttcgatcggaccttacgcggtgtccatcttgtcctcgtccttcttatctttgtcaccgctggattcgccatggccctcttcggggatgttgcccagttgcgtcttgccttcctgttcttcccggtcgcgcttctccttctcctgtcggttcttctcgtcctccatcgataagcgcagagcaaatgcgagctcggggtcgttctcggcggcgtcatcaaatccaaatccacccgcctcaccctcgccgccgcctccaccgacgtcggcatcctcgccagccaggatcggagtctgttgcagctgatcgctgagaagatggggtcccggtgggatgatagcaaggtaggaaccatcaccactcttgacattgtcaacgagagcctcgagcttcttggtctgatcggattccaaatctccgaaagctatcacgtcgatcgacacgttgttcttcttcatcttctttgcgagcttcactagagtcttttcatcttcttcgatgggcgagcaggagaatacgatgatgcgttgacgctgggatttttccatacggtgcttgagtgccagctggaatgccatcgaagttagttattgagagctggggacctcggagattggctggaagaacgtaccgctgcaacctggatggtcgagctgagatgagctgtgccgtggatttttgtttggtgcaaaccagcgaggattgcgccaaactcagatgtgaaggttgacaacacctcggggcccttgccgcccatgctcataagaccgacagctgactgggggtttacacgcatctttgcattgtggatgatgctaacggcatcgacttgagattgccaccgggttgatctgtgacagttagatctcatccgcagatgcaaatatggtatgatcggatgtactcacgtgtagtctccattgcgactgctttcgctgttgtcgacactgtagcttggagttagcagagtaagctaatctggaggatgtgcaatgacggacatgatcatagtagcttccagcgtcatgatggcggaatttaaggaaattaacgatgtaaagaagggcagaacagagagtgaataggagatcggcgtatgagagacgaagacggatgacgaaggcgaggtggaagctctgcattctgccactgctccccgcccgaggcacctgtttgttgtggtcttcctggctccgcacttgtacttcgacacatcccaagtctatattccttgaaatttacccaatgtctgctattaaacgaaagtctgacgctatggacgtcacgcctacgggcagtccttctaaaaagatgcgcttaacgcagcttcagaagcaggccctgatggacaatctacagcttgaaagtgggtttaattgtgggtttgcgcggtgaacacagcactaatcttgctacagtaactgagcgggcacgtaagcttcgtgcccaatatgccctgcaggcaaatgacctccgggcgcgtattgagcgacgcgtcaatcggatcccggtctcgctacgcaaggcaaacatcggtgagctgctcgaaaagcacaatgcagcctcaagcaaacaacgggttgcgtcgccttctcggaaacactcgcccatgaaggtgtcgcgtattataccaagtatctccgtagaccaagaaacttctaccacacgcgatggtagagctcggaggggaaggtacgatataccacaagcccaatttggttttcttactgacagaatgaacagccacgatggtcacttctctgacaaagagaatgcccccgccggttgcgagtctgaactcaagaatcctaagcgtcgcgtgaagccagccggaccaggcggggcctcacgcgtggcatcccaggaactacgaggcaacgagaaccggatcttgtctcccaagtccaataattcccgcacataccctcactcgcccttccgtgcatctcccgagaagggtcaaccctcgtatcttgcacgccctacctcaccgctaaaaccgaccagtccgttgcgatcacgcggcgccactgtctctgcggggaaggaccagcggcctccttcgcaggcccagaagactgccccccgtgccgctacaggacccaaacctgctcggtcacctttgtcgcgcccggcgacccgacaggccgagcgcaagaacagcacagggtccaatgtgtcttcgggtacaacagtaatcaagtccacacggactggtactggcccgagaaaggcaaccacaacatctgccgcggctgccaaaaagccgactgcccgtgggcaggcggtatcaatggctgtcaagaatccctctgcgactgcttcaatgcgcaagactaccgctccggctgtggctgaaactatgccccgaactcgagcgctacgcaagcggatttaggacgcacagacatttgtcttcttgttttggagttggttgggattatgtacctttgagcgtgggtgattacagactgcaatgaacaatatgagcctggatgctgtctttcctgttgattctttggcgcgatatcataatcggagttttccttttcgaatcttctatattcatagcttttgtccgggtatctcacccagcttattttcgacccaatactttgccgtcatagccatctatctgtgtgtatccgtctgaaaatttcaaacagacctgggcaaatacgagacccctgtcgcttgcctaccaatcaatgatattgctttttccatcacaccgctctcccggtgagttcattccagctcctgcccagctaccacaactcgggcttcacataccgcgagcaccaatctccgtgttttcataatggagatcatccgagagtctacgtccttcgaaacccttgacggcagagtcatgtattgctgcaagaattttgtcgtgcgacaagatggtatcctatactacgggtcgtggaacgatcgatcatcgaaacctaccgatatcagtcagttcaatgatttgaggacgatcaccaccaacgatcgaggcccgaaaatgcaggacacatgggctgtggcatccgaggaagactgttacctgaaaacgccaggcgtcgtcgatttcctctattcaaagctggaggacgatattcaatgcgagcttaaagtgtgtgaagtgcttcgcagacatccacacccgaatattgctacttattacggctgtcgtgaggagaatggtcgggctactggtctttgcttcaaacgatacaaggaatccttgacggagaaagtcaatcctggatacctgaacaagaacatgttccgggctagtggtcgtgagcaagtcgatgattctctcagagagaatttccatgggattttggagggaatcaagcaccttcattctcttgggcttgtgcataatgatatcaatccgttcaatatcatgcttgatgagcatggtgtcccggtcatcattgattttgggagttgtcggaagacaggggaatcattgaataacagcagagtgggacagacagacggatggcatgattcaaaaaataagcttgtcttggaaaagaatgatttggatgcctttgaagagttgaagacctggctgtttggttctgtggatgatgaatatctgttccacgaggagtatcaatttgaggaatgctagacggagcttagaattgcttacagtacccgctctgattttaccatggctttactatcgaagtagaaagcaataactatactgtccagtgatcagaggttcagacttcagacttcagacgttatacccaagaaggcatcagcgaagtgcggtataggtgtattcagatatttaatctaccatacaagatgtacaagcaacatttaaaagatgcactagcgaatagacttaggtaggctcggatagtggtggtttgaattcaaagtgattcaaggttgatttattaggacttcacgaacatgcaaggttttacataagtatctctcttaggcaattacacagcacagttatcgtagcaatcatgttgattgaacaaataagaaaggaaataaaagctcccttggctccggttaagcaaaagacccgggagagaagaatcagaaaagaagaaaggaaaaacagggtctaggtatagccgtagcctggcccacgaaaaaaaggagcatgctcagaaatcaaagcgagagagaatggaaaaactggacattgatgcccaaagggacaggtatgggtatggctgatccctcgaatcagatgcaaatgaacaaaggtaaaaaaaaagagacaaagtattccagccactatagaaatagggggaagacaaacagaaaccaatcaatagcgaccaagcagcttgttgatcacttttggggaattttcatggaaaaagaaaagggaaaactccgtcaaccagtcctatcactggacaaaaaagaaaagtaaaaagaacgctaagaaggtcccaagaaacaagaagcgagaaacgagaaatgagaaagataaagaaaatccactggattgaatcagctggatgcaagtcagagtcggatgatgatgtatcacagtattgcagctgtgcaggaagtgtaaggagatccagtctacccagtaacacccatggcacccgcattcgggcgcggcctataagccacattggatggttgaccatcaggtgcccctgcgattggctggcttccgttgctggtgctacggtcacggcgatacgctgctgggggaggaggaccgaaatcaagtccggcctggatgttagtgctggacgagtgtgcgtgtccgctgggcccgaccacatggcgaaccgagctttgcatctgccaagctgcatcctgagatggatcagtctcaatacgcgcggaagctggagtgctattgtttcggttgggggtggtgatggtgaatgtctcgccaccgttctccggtcgctgtgcaaagctgcctcgaccgatgtcgccatatcttttaaggatttccttggttgtcacttcggcattctccctaaagagagttggatcacccaagaccgattgtaggtcttctggaatctatgaacagagtcagcacaatcctagcaaaagctcaacctgggcgatttacttcgcagaatgcatcgttgtacgtgatcagggcattaacagcctcgatggccaagaagctctcctccactgtgctgtttttgacattggggtagaggatattgggcgtgatcacagtcgcaagattatggacgtccatcttgcttccagactcttcatccacatgtgagaaggatgaagtccagtttaagaaggcaaacaggacttccatcgtatcacgatgggccttgggaagcagacagcatgtcaagtgaagtagtcgcctctgtttctctgtgtcatccatttctgcgatacagttagcattgcacttgtagaccgataatcctaacatcaaaacttactttgtgagatgacaaacagtctatgcagcttgaaagtcaagagaggatcgggcatttcacggaggaacttcttcaaaagagctgcaatctgcacgggagtttcctttgtcagatcaacttgctcgtacttggtgtcaattagctctgcggtgtccttcaatcggcggatgtttccgttctttcggaagacaccctccacagacatgtccatctgccgcatagcgcagacagaatcatcaactagcgtcgggatgcggagcgcaccaggaccaacaccgtgacttgactctgtgccctccttctcgaccagatagtctagactgacaccaaagacacccttcttcttattacccttcttgttatccttgaaggcacggccaaagatgttccatatggtaggcttgcgcgactcgataagggaaaggagctcttccatggtgaaatagccctcgactaacggttccatttggagtacagcaacgtggcgaacgatgaaatattccaaagcagttagttctgagaagtaccgcttggttcgggttggctccatcatcgcttccatatttccacacgatactccccgctggtgaccctggttatatctgggcatctcggtccccccaatgagctttgtaccagcatgcctgtaggcattaggtcgctgctccttggcttgctcggccgcaacaatgcgggggatgtcatctagcgtcaaagcatcctgagccccgaaagtcagatcagtaacaggttcgccattggcatcccgttcttcgacaatctggaaaccgtggctcctcgggtcaccgccatcattgccagatgaccctggtcgagcacttctgccttctggtccatcaatgattctggatgcgcgggctcgtttgtacgttgtggatagggttcgctcatttcgaatagagcgcagccgacgcatctcgccaacggtctgctcgagcgatgtttcttcgaggccatctcgcgaggaaccgccatatgactgggagcgtgtgttcgcccggcgaacctgggaagtgactcgatagccgtcattgttgtcgtaatcattaaggttggggtcgtctgggacgaatcaagttagacagactgccggcggcatgggggtaatgtaagagtatcctacctgaggtatgaggcaaggttcccccggatcgcagtacggcgagaagccgtgcgagtgccactttcagcaagaaaacgaattgctgcaattttgagactggagtgaaaccacccttcacggtggggccaagtttcatctggcgggcgcaagcgccgcagtagactttttcctcgctgccgctccacaatgcgtcttggaaatcagcggttaagtccttctcacatgatttgcatgaaagatgaggcggcttgatgtgccaacgactctgtcccaactgaacacattcgtcgtcaattggttctttacaggcaatgcaacaatctgaaagttgatcggccaagccttccactccagccatcaggtcgactggcgtatcgtcatcctcgtctgctaatgactccagatcacggagacgctctaggaagttttgtaaaccatctggcgcagacttctcgcgttcaagtttcagtgcaccttgtagaccgatgcggataaggagtttgaggtaatgagcgagaccagtcaccagagacaggagttcctgggtgacgccaagtttgcgtaccccagtttcctgggttttcgatagaagggcgaagaaagcgacaatctttttgcaaagaagtttggcttcgcggccataggaaagttctggttttgaatgatcagcgatcgccccggatgatataaaaccagccgcgcgggacttaccttttaactcgtgggatttgatgtagtctgccaactgatcgactgcaccgaagaggatttccacatgttcgatgaagcgctttgctacgagaacaccatcgatgtaagcgccgttactcacatgaagtagcatgtctgagatgcaagcggcggatgattcttcaaaggtagaaagggtgttccaaatattgaagaccttttcttccattaaatcttctttgtcgcgaatatgcttgcgctcatcttcgctggcatcctcatccacgggcggaggctcccatgtttgaccggcaggggataaccggacattccagaacttgtgaatcatataacattcggggtgccaatgttgattttgaccgttgcggaagatttcgacaaactgtttcaggattgctgtgtgacatccatggcaccgctgggcaaactgtgttgagtagtgaaagtggcagtagaccttgctctcgtgttcatagtaagagtcctgcgcaccaaagacggtcgggcaaacggaacaggtgaagtgttcaatatgatacttccggtccaacgctgtaatgtatgatccgcgtagtgcgccgccgcactcatggcataggagacccagtcgtctaaagtaatcggtttcacaaagcggaaactggcagcttgaatcttctgaatcgacggggaaaaacttcgaagcaacgatctcgccacagtcctgagaggagtatggaagttagagaagaccccaaaaacgcgggctagaaaaaacaacttacttcgcacttgaaacactctagatgaaaagttccccctaatgctcgaacaaactggccagtgagagtttcgccgcacttttgacacagtcgcgatgaaccacctggagacttgttctgacgcccgtttactcgcgagcgatctcggggcgcggagcggtcgcggaagccggcctggtcaggacccagaccacgacccgagcggccaccatcctcctggttcgccggactgatggggcttgggcctgccgttcgtgttgacggtgactcgaatggaatcaaactatcttcgggagatgtgggtgtgtttttcgtatagctagccccgtagccagaggtgtcgacggtgggacggccgctgggattacctgcgaccaggctggctgggagtccaccggggggcatcttggtcccccgtcaggagaaatacggtggggtttgttgggttgaatcacgccgaacgctgcatgcaaatattggagagtaaggaacgggcgaggtgacgtggtaaacgggagttacggtaggtttgtatcgaagatgcaacgcggttacagattggcggcaaattgaaggtcagctgggcgcgtacggtcgagagtctgattcttaaattagaatctcatgccttggggtcactgttgttccccagagtgtactcaccctcatgccatgtaaagacacgcgggggtggctgatggaggagggacggaaataacgcgcgcgcaaagccagaggaatcgaattgaggaggtggtatagaggaatgttgtcgtgaacgaagggactgaaagcgcgcgggctagaggacgcggggaccggtcttcgagggggattgggagctttcaaggtgagaccaacagagggtgctgattatcgggccacagtcatcccaaactgaaccgacagcagattccaggactccaagaacaagatagaaaaaattaaggtgcaagggcgaggggaaaagaagtgggctggggaggaatggagatggagatgccccccccctcccctaattagttagggaccctgggtcacgtggtctatacaattcccatgtggacggtcaacttgggggagtgggtgacatattctagggtcttttagacatgattgcaggatatccaaggtcaaatctgattgaattgatctgagcacatggcaaacatcaacattgcactgtgtactatgtgcatgtagacacagcttcttgtgtactccataccgccccctatgccatcactgtgctttttatagaacactctgcagattagtgtttggtttttgtattttaatttcagaagtgacatggtagtttgtatggatatgtatgtcttttcccctaacatagcatcaaaggtggaatataggggtattttggattgacccttgactatgtcagatagtctccaggttggatatctcctaaggatgaaggatacacgaatacttaggtatctccatacatagtactccgtattacatgttagtttcttacatttcaaagtttccagggagatccatggaaaagtaatctcatcagactgatcagtacatttggattggtcgaagtatgttgatgttgatgggattacccgtacagtggagagtaggaggctggtagacaaaaaaacagacagaaatagaaaaggacagaaaatagaagatcgtgaagatcaggaaaagtaaaacacgaaagaaagagaaacgtagaaaagaccagaatacaaacaaaccaaaaacacgttaagggacaaactgtctagtcgccttgattccacctgactttaccttctctacctcctcttcatcctcctctagaccatccacaccattcgtgcttttaatacatctaggtttctattttctaagttgctgatcataactctgcgaccttcacgatacacccgtgaacacctgaccaactcacctcagacgttgcaagatgggtgaccagtgcactctgcgcctcgtccgagtacgtgcctttccaactatgattcatttgggcaaattaacccgataaaaacactaatctcacattgtcgccttaggagttgagacaggtcgagcaaagtgaacaactgggtatgagatctcttagcacttcaagccattccgtatggagacccacagactgacctcgatacagccttcactatctactacgaagaaagcaacattcgggatatccaggccctcatcatcggacccccgggcaccccatacgaactgggcttttacgaggtgagatccacccagctattcaaggcgggcccgggcacgcttgttgaactatgactaaccaattgtaatcgtctgccagttctcgatcaggatcccatcaggtaagatgatcttgtctttcatggcaggtccttgctaaatcatatggtaatagattacccagcaaatcccccggtggtgaaaatccggacgaccaacaggggccgaactcgctttggacctaatctgtatgctaatgggaaggtctgcttgtaagtgtacccggatacttcttttatacaacgcctgatactaacattttctaggtcgatcttggggtaagcttgtctaacaatagagggtttttatggagcatcgctaaacatcgcaacagaacttggcatggttcccgaggtgagcaatggtcgcctgcacagggactcgagtccgttctgctgtcaatccagagcctgttatcatcaaacccgtatacgctggaaccgggatttgacgacaacgaacgggcgaacgacacggaaaatatggagatctacaagtccaaggtaaagatcgctatcttgtcagaataaactggacaatgctcacatttatatcagattcgtcatgagaatctacgactagcagtcattacaccggttgaacaagccttccaaactgcgacgcctccccgccgaacggcgccaagggttggttgggagtctagcacggaagaagatagtgatcacgaactccaactcgatctagacggattccccattcaaagcaagtttggcgacttttgcaagcgacggttcctatggtacttcgagttctaccagaacgctattgagaaaggtatcgcggacgaggcacgcagacaaggaacgcccttcatccaaatgccgtttgaaggctatggcaattccatgggcggagaatggaactacatcgccctacaagcccgtttgttggctgtccgagaccaggtaatggaagagacaaaccgctgggccatcgagggtcttactctggtcaaggaggatgctgggattgccgttaaacttcggggtcggcatgaacagattgctgcagaaatgaacagttctcctcaagttatcgatctgtcactggttgatgataacccgttcgtctggagactcacctatgttggtcgcaacgagtccaagttggaaggtggcatcatcaagatcaagattcacatctctccccgacacccagaagaacagcctcgggtctttatcgagccgcccctgtaccacatttgtgtctccaaaatgggtgtgttgatgtatcttccttcgcatgctgaagagatcggccaacatatcgacggcatcatcaatacactggaagaagacaaccccccgtacaatcccctcatgacagtgaacccagaggcaaccgctctgtgctggggttcggaactagatcgcaggctttacagacgcaagcttcgagcatcactagaggattcctgagctgagctagctcactgctggtgcatgtttgctaagcaatatgtcatgcaacatgacagtattcggttatcgtcaccaactctccctcgcttgaactgtatcattttcctgccatcactatgtcttgccactgtgccttaccttacttgagatattctttatgatggcggggagactaggaattggcgcgtggcgtaccatttaacacagaaaaatcgatatcaaatagtattcataggtacacaaaaaggaccttgatgacgtcttgtgatcaagtgtaattaccgtctactaagtagatatagtagacggatgagacaacaagaaaggctctgtggctagtagagatggacggaccaccatcttttgactgtaatcatatagtttgtgtaaggctcggggcagttggaaaagtatgggtactccaagaatatcccaagaagagaatcaactttccaaggtcagctaaagtgggatagttataccaggaaccttgttcacggcacgatagtaatcacgaatcatacaatgcccatagacgacacaagacctcgggaggaacagataccaaggaattacgatgccacaggtcaatccaatgatcacaaatcctttgaatgtgtcggcgttgcgggcgatgtttcagtctccgccacttggaaagtgtgcgcacatttgcccgaatgttgaacatatcaatcatgtcagtcgaaagcattgctaatcccttccgtacttggcattcatcccaggacacacagcataatggtctctgaagacccttttccaacgccgaaatttcttgcggtcatcccaaatctcggcgatggccctgatatcagccatgatgttcgccccttgaggcatataagtttgtgacgagaaggccggcgtggtctgagcttttgtttgaggctttgggggttatagtgaaggaatcatttctcgaggactggcatttttgttgtcaggccatcaagcctgagggtttcaagctgtgctgccaaagcatcaagccgtttattggcggtcgacaccagagtatccctagtaggaaccgtttcggccaccctgtagacctttggcgaggtgagagcgccgatgttgtctggagtgccatcccttgtagatttttgatgtcataagttctccatgatgaaggcgtcgcgatgcaacattggagtcatctgaatatgagtagaaaacattgaagtcaaagcaggggcaaaggaaaagtcaaaagggaaggtccgttccttctttgtatatatttgaagtcaaccagcggtgcattcatggatagggtccatgacacatccagagacagcgaattccattcacttaaagtagttctcggcatgatatattatcaacgaagcaatgttcaatactacttccattgaatataaagtagaaaaggtggaagaagtagaagagtgccaagtttaaggcatagcccgcacggatcacctgattatctccgccaacttccccggccccttttcagtcaactcccatcccccatctccctacagaaaaatcatatcatgtcggcaaaaaggcgcacgttagagctaggcaatgtcctcgtggtcggaggctgtggctttctggggtggcatattgtcgatcacctgctgaatttcccctccgagaccgaccccagttacgctctgccgaagcccgttggcgatgcgcgcttcgagtacccgactctgaaatcgcgctacccggattacaactccacggtctctgtcgttgatttgcgcaccaccaacaaccgtcttcccggcgctcagtactatgacggcgatatcacttccgtcgagtccatgttggaggttttccgcgctgtcaagcccgatcttgtcattcacactgcctcgccatctatgattgatggcaacaagcccctgctgcacaaggtcaatgtggacggaacacggacgctacttgaggtcgccggtggcgaacatggtgattggggtggtaaatgcaaggcgttcgtctacaccagctccagctccgtggtccacgacacacagagtgatctgaagaatgtgaatgaggaatggccctacatccggggtcctgcgcagaaggagtactactccgagactaaggtgagtttttatcatttttaaacagatcttaatcgggatcaatcactaatcagaccccttgtctttcaaggccgatgccgaggaaatcgtcctgaagtacaacaagaagtccccgaatgagatgctgacagcggctatccgtccggccggaatccacggagagaaggatacaacagtcacacacaagatcctggagcacggatcccaagcatcggatagagtgttacggctgcagctcggtgataacaacaacctgtttgatttcacctacgtcggcaacgtggcttatggtcacctgcttgctgcgcaccgccttctcgcgagctatgaccttctcgcagctggcaagggcgggccccttgactacgagcgcgtagacggcgaggctttcaacatcaccaacgattcccctgtatatttctgggatgtcactcgtgccatgtgggctctgatcaaccgtgtcgttgagccggaccaggtctgggctctgcccgaaggcctccttgagattgttggtggcgtcgccgagactgtcatgggattgtttggcaagaccccgcgtctcactgcccggacagtgcgatactcatgcatgactcgctactactcgactgagaaggccaagcaccgcctggcttacttgcctgttgtgcccttggatgagggaattgcccgtgctgttggatacattgttgcccagaaacaagcggacgcaggaaagaaggcattgtaattgaaattagatcatgagattgaaaaaggcatcttatgctgtattaatatgattaattacatttacgcggttcatgtgaccatattaccttaataggaaagtgggccacccatggtttgttatatcagagttgtggatgtgttagtcacgtggaagtgatacaacctcgacgagacacttctcaacaagcagcctatctcctgcaactcattaggcctcaagcctcaatttgccatcacaatgtcccattttgagaagcagtgttctagaatcgattacgtcaacgaaactgggacattgtaatgcccggcatgcctgaagctgggtatcatgcttcattagactcgccatcagagtccatgtcgcttttgctcacaatattctacgttgtagccgactgaacaaccacatgtagagcgggatcgatattctcaggcctctaggcaaacaaacgttcgtcattgtacaaacaaccgaagaagatgttgagggccaggtgcaagtccttggtccagcattggagcctagaggcattcaaatgtaattaccacacaatatcatcgctggaacgacatagtatggttgcaggtatcccgggtcattctctcggatccagtataagaaccagacttgacaatctcaccaacgcggcatccggggtactccatacatacggagtacgtatctgactatatattagaataaacgtggcaattcttatttgtgtggcgtcctcttggcctgttcgcacttggcacttggctcttggacctttggactctctatcctgtgataggcgtgctatggcgtatccgacactacaggttgcgtgctgcatgtgagctggaatatgaatctgataatcaacccttgcatagcttcaatccaaaagcctcgagatacgcctcaacttatttttcttcgaggtttctcttgccgccttcctcagggtctttgtggtctgtgtgtactacgtcgtacatcatggggttaacaggaaccaggctcggagccttccgagcgtatttctttggatacttcatctgtaccgcaggtttcttgtttggctatgacactggaatcgttggcaagtaaagcagaaagcacatgtggttgattcatcgctaacagttttgatggataggtggtatcctcgaattcaagtcctacatcagtgatttcggctatacggaccaaaccaccgtcagcgctgtgatggtaagcttgcaaaatgtaggcgcattcctgtcggccctgggtatattctgggtgtccgaacggtacgggcgaaagaaaacagtccaggcagccatggccgtgttctgtatcggtgtggttttgcaagtggtaccttcacactcactcgtttgtttctatatcggccgatttgtcgctggtctcggtctcggtgcaggcactgcggtcgtcccagcatacaacgccgaaatggcacccaaggaaattcgaggcaagctcggctcgggaatgcaatggttcttcgcactcggtgtgatgctgagctactggattgattacgctgtgaagctcacactgcccgtctcttcgaagcagtggcagattcccgttggtctccagatggtgccagctggagttcttgcactgggtctgtgtggtatgcccgaaagtgtgcgttggctggtcaaaaagggccgttatgatcaagcatgggaaagtctgaaatggatgcgagctagtgaaggtggtgacatgccctgcagagcgatcacgggacataggactaatcagctctcaataggctctgaagtgaaggcagagttcaacgaaatccgagtcggtcttgaggaagagttgcgagcaaccgagggcttcgataagcgcgaacttctcgagcccgcaaaccgctacagactgctcctcgccgttttcatgttttgtggtcagcaatgcactggtatgaccgcgctggcttacttcggcccgcagttcttcaaactgatagtcggtaacaacaccaaccagtcccttctcatcactggtcttttcggtgccgagaagttcattactgttggcatctatatcttattcttctccgagatgtggggacgcaagccgaccctttggatttcagctctattgatggccatttgctttattattgttacagtcgtcaaggaaacaacgccagagcccgatgcaaaagctaccccggctggtattgggatggtggctatgatcttcctgaccaactcgatctaccaattcagttgggggccattaccatggccatacaccgccgaggtaagtaatactatgctcgtctatgaccagctcagccactaataagcatgtagatcttcccaacacgaattcgggggattggaacctcggtcgctgtatcaacacagtggcttttcaactttcttttctcgctcgtgacgcgctacatgatgaattcgtggggcagttatgtgttccttttctatgcgatcctggatatcatcatggcaatcattgtcttcttctttgtcaaagagacgaaagggaaaagccttgaagagatggaaacaatcttccacagcaaggctgcatttgacgttgatgccatccgacgcgaaacgcttgatgcggaggaagttaatgttaatgtacagaacaaatccgtaggcctccctttagggtaacgaaaatagctagttagaagatgcgaaaagtctaaacatgacatttaggcagatacccttggattgaccaatcagagaccctggaatcgctgtaggaaaaaggggcggattcgagaaaaacttgccacttgcacttttccttctcttttatctcttcttaaattgtgaacaggcaaagcgtggatagttctgaacttttaaattgctgatcgattggaaaaggatgggtgagtggacagctatgttacccggcaaagcaggcgaatctatgactgacagtggtgtgtaggttattatgaggtacagtcttttgccttgctcaatagacagcatatctgaccgtttacaagtttcgctgccatttatgtggcgtgagcttcaatgtcttctttcgcctaaggtccggggagctggacttgtctgatcctcaagacggccgattctttgagccagacccgcttgattcaaaggtttatgatgacatggttgaagaccttgactatcaacccccaaaagatattggtgacaatgatccatatgaatatgattccgattacgaatcgaccgatagcatgagccttgacggagaagatgcgcgtgacaatggagatagcgaagacagcagtactgatacaaatcaagaccccgaaaggaaaatgtatgaccactgggtatggcaaactttcaagcggcctggccttacagatgatttgcttcgcgttggattccttgataacccaacgggcggctattcggtggatgctatctcacctgaacaggcgagcggctgtcgcaccgcccagttcctggtgcataactcactccagagggatacatggaagtctgatgaactacatgagccatgggagatcgatggggattggtctttatccgggatttgtgatggagcgccgatggacccaatagtgtttcccaagcgaaatgggttggaatatttcgaggcagatgatacgttcatttctgtaggtatctatcaagcgcttgttgcactgaaccgcctcaggggcccaacccaaagctgacactggtggaaagcagaacataccaccgaatgaaatagccatgccattccatccgtggtgctttgatatcttctgccgacaatccaaagtccagtttcaatgcatcaatgcgtcagggctgatgacctggcgaaattctgagtttgactatgattcacgtgactcatttcctcgatgcaaagaggttaaaagttcacagaagcagtggtggtttcatcagcctggtaccgagtatctgattgcaaacccccttgacgtgcctggactaccagaaatacttctggctgcggtcgagaaccaagaatccgatgcctcttatgacccatcgtatgagattgaatcgtctcaatccccgacgaaacgccctgtaccatctcacaatagtcaagccgacttcctctctgtccttccggccgaaatccggctcatgattatcgactatttagactctagtgacattgctagtctaaccgttgcttccaaggcattcactgaactcccaaatactgtgtggtatagactagtacgccgagaaatgccctggttatgggaagcctgggatgaatccgaatgcatacacagcccttcgatgtggacaaatatgcaaacagccgagctcaagtccatgatcagattacgaaaattttatgttgagggcttgctggtggattggtacacagagcgtgacgccgagaaagctgctgaacaccgatatcctatgacagtgaccatgccggaccaggtgaaattacctataaggaacaccgactggcgtcgtgttctattgcaaattcaacgcaattgggacatgcttaaggggttgcagaatcgacagcggatctggaccgatgtggaggagattataaggcggattcgcaagttggacgcatagtacaccggtgattttgttcagttagcctgcaatgtagtgaacttgggttttgcaacagtacaatatacgcactttcgacgcttatgcttgtaaatctggcgaaatagattggcagtcatacccaaataggaaggccagccagctcttggcgtcccccgcagcggcgaattgtcggctaatcaccccgcgacggaggtgacggtgaccgcatatatctcatctcgtgttactcctgcacgattagtatcaaaatccaatattttataaatggctgcctctgagaaacgccctgagatcatcgagcttgctcggggactggcaagagtgcccttgtgcgaggactatgagtgtatgatatctgggatgatgtgtgtatcatttaaatccttacactttgacgggacagactgttgacctgtctaggtacaaccccaacatcccgaaattgctagaggcgcggcatttatgtcggggacttgctgcagacttcaacaatctggacacaaagaccgtgacgtatgacaagatcggcgacaagcgtcttgagttattgcggaaacttgtcggcaaaattggagatggaacattcattgaaccaccatttttgccagactacggatgcaatacttcgatcggaaaggattgcttcttcaactggaagtgagtcttcatttccaacctatgtcttgttgaaacttgctaacaattcctagccttacgatactggacaccagtctagttgtcatcggtgaccgtgtacagattggcactggagttagtctcatcaccgctggccatgatactagcgttctttctcgccgtaaattcgtcgagtttggccatccgatctttatcgaagacgactgctggattggaagtaatgtgattgttctgcccggtgtgcgaatcggccagggctcaacaattggagccggatctgttgtcaccaaggatatcccgccgttctctgtcgccgttggcactccttgccgcgtgaagaagacaattcaatcggcggaagaagaggagcaggatcctaataatccgtaccgcagtttggttcgtgaggatcaatagaatttgatatagaatcaaatagaattaccggtagacgaggatcaccacccccgtctctgaacagcccacgtacaaatcccgtatcacttttctcaatgcgtatccctcatgtcctgaatagcgctggcgtgcaaccctggtattgtttctagctccaaagcacactgctacaatggctgcatcacctgcttttttaatcttcgacgagtaacgatccttggaagcgtcgtaactccacataaggttgggtgcatgcaacatggagctacccaacttgcggtccataaagtggacgctgtggtagcttactcgagatctaccaccattgctataatatgaagccccccgtcaagagattggcttatgtaaatgtctacaaggttcagaccagttataactttttttatatcagattaataaagaaaaatgaacgttatacatcttatccctcttgtaccttttgtatcggcgtggcatacaaagtatacgtgatgtgaagaagtatcatccggtgaaaaatcaggagcgcgccaacacctggaagtattgttgtgtgcccggcactatgaaccttgtactaacggtctacaaagagtaagacgtctaattcagttgtgtagagagcaattgaattgttgaggtgtttcctcatgctgactatgaaattctaacagagttgagaaccggtccatacctaaacgagatacctgaagcccttgcgcatacgtagcgactcgtctgggtgatcgatgatgtcattctcagtcgaatcccctctagcaccatcggcaagctcgccctcctcgagctggtggttcaagctgaccaacatcgagcggaaataccagcatccgccgactgtgacaccgaacatggccagcacaattccatagctggagcgatatccattatcttccaagtcccagacatatgaaccagcaacgttgcccaattgactgaaggcattgatcatagcaatggcgacggctcgcttggctggaggacgggggaatgaagaactgatccatgagtagaatacgatgaatcctgcgtaggaaccagcctgcaggaaaagcgcgacgtagcgagctgcggtgttgctggtggccatgcagatgatgaagccgacggctcccataccaatcgggccgatgatatgccagaccttttcttgtgttttgtccgcgtgccatgcattaatgacagagaagatacaggagaagacccagggaggcgcgctcatcaaaagagtcgggacatatccgaatccgagcgtaccagtgagggtaggctatgcagcaagtcagtaaaatatcccaactggttttttgatatgacaagacttacgaagaaagcattgaaagaaagtcccaccacataagccacaaaggtgaacatcattacatagattttggggtccacaagcgccattttcaggcctccaagagccccaagctcttcaccatcggtgtcagcctcgccgacatcctcgagcatgcgaagttgtgcaacctggcgctcttcctcggtgaagccacgcgcattatgtggcaggtcaggcaaaatgaaggcggcaaggatggcgaggaacatggtcactgagccttcaatccagaagagccagcgccacgcggcatggcccatgacaccttgcatgttggataggacaccagcaccaaccagtgcagagaatgcattggagatgaggttaccacagaacaggatggcgttccgggttgtgagttcccgacgggtgtaccacttggagaggataagcaaggcaccgggcaggaacgctgcctcaacgaaccccagcaggaaacggacagccaccatgtccccaaaggtcttagtgcttccagacaaggtggagataacgccccacaatatcatggcgacggaaatgtaaagcgagggccggctgatacggttgatgaacatgttggaaggcacttgcatgatgatgtagccgacataaaggatactcagacatgtagagtagtcagtattgctcagtttgagatcttcctgcagacccttgagacgagcagctcctagattgttcctgtcgaggtagttcatgactattgagcggcgtcagcgatgttgatttgatgtatatgccgcacggcggcgggttcaaacactacacaaggtggtacgcactgtagatggcgacaaaaagactgcacctagcatcaagcttccgcttgagcttcttctcgacgactatccggcgagctggatccatctgagccacgccatcttgctgtggtgaggcaatgtgttcgagattttcaacccgttccttctcggcctcaatctccatccggtcacggttttcccgtgagatatcgtccgccattgtgtgtgtgattgtgagcaaggccagagaatccggggaacagaaagagcagattcttgcatttaagcggaaagactcttctcatggttcatcccgcgctagtatttttccccggtacccccacgcctagatcgtatgtaaatcgtacgcgggggggatactacagtggagttgcggttgaccgactcggcatccgagagcaggagacgtcccgaggaggcatctgattggatatgactgaaggggaatatgagggggggaagtttcaccccgtgttctggtatcggcacgggaactttttagggtcacaaggtcacgggatcacggctctcggacttcactgtctctcacgggacgcgaggaaaacaccgaaaaccccacaaaagccagaagaaaccgggcaaacccgggagagaccggccaaaacaaaggagccaaaacaaatcttggaagtcagaaaagccgatatccacacggaatccgagttcggcatacggcgccaatcccttacaccttccccgcctctccgcagtttgttccctctcttttctctcaccgggatcatgaatgagatcatatccccgcaaagccatttaattcgagtccaatggaatgtggggaaagatatacacaacgtacgatgttgtatgttgaaacgggccatacggtctgaagtacagtatcgtggttgtgacccgggaaaaacttgacaaatagattctcgaccttctctccacttggtgagagtttccgctcaagcccatacggcatttgtccggtaccccacgctcggtctgccgatattttgccgcttcctcagttaagtgtctagtctagttgtttacattgggtagatggacaccggtggcttcggcctgctccgtcagctcaatttcctccacgcggtcatcctcatgccacccctctcggtcgtctttcactagtcggacaaagcacacgtcaagtataagtgctacggcactgatggcaacaccgaagaaaagtgccgctcgatatcccgtgatttggctacccgagcggcgggcaatttgaacctcaatggtagatgcaaagcctagtccgagactgtttccgtatagattcaatgtgccaatcaccgacccggcaattccctgctgatttcgacgcacggagttgctggcaatgatctgaccagccgtgtacacaaagtccgggcagaatgagaagaggaccacggaaggaaaaatctgcggccagtaagattgatggattggtacggtcgccatgagcacattggaaattaagatcgtgacggttccaatggccaggatccattgtgctgccattcgcgggatcatccatgctgcgagacaggcagcgcccgtggcgcagatcacgaagggggtccagcctacggcaaattgtaggggagaccagtgccagactttttgaagccacaacacttggtaccagatcaaggttcctacggccatataattgagaagcacgaccaatagcagcatgaggaaggatggagctttgaagatgtcgagtggcatgatcggctccgcggcatagttcctttcccaaagcaagaagcccccgaataggatgattgagctgatcaggagaacgatctcatagggggttgaccaaccgacactcggtgcttgactgtggaatgttaacatgcaatccttcgggttaatctcaacaacttacttccaaacaaagttgaacaagatcaacgagcttgttccaagagccgatccaatgcaatcgatctttccatgccgatcggctggtggttctcgcggactcaaagcccagagaggagtgaatgtggtaacaccgaggcaggcactgtgttaccaacgcatcagtacctacttatgatccgggttcacggggtctatcacctacatgaagatgaaaaaccacttccattctgtccgctgtagaaaggcacccaaaagcaaggccccaaaatatcctccgactggtgccgacgcaccaaagagaccgagactgagatttcgcacgcgaccggggggattggtgctagatatcatggccaccgcattaggcatgatgaacgcgcctccaagaccagctagagcccgcatcgtgacaaaggcgaagaagttgttacaaaaggcgctggctagagtgcagatagtgagccaggcacccccggctaggacgagttctcggtggccataaacatctcccaatcgcccactcaccaacacgaaggtaccttgggttagactgtatttatgttagtgagatggtgtaatcataaacatctagatactctgtgccttacgcatagctagcagcgatccacgaggcgtaggtgtcgtcaacgcccaatgattcactcaaggcgcttcctccagcaatgcctgcaaaattgactgtcatctgatattgtcagtattggaggattttctgctctgaagaaagttgacggctctgagtatacctgtacgagattagccagaacaagcaatgcagtaatgaccactcgacgcgatctggtcgtccgactgggcagtgcccgctcaaagacaagttggccatctctaggggtcagattgtcttctactgagacctgcgtgtctggaacatgttcagctggggtcgcgggggtcgggtcaagctcttgggccacagtagacgatgcaacaggcttgatgtcgtagtgaagagcatgtaagagcgacatggtttgataataaagggggtgtttcctattctttgtgactagaaatagactaaataagatctcgagtttaagtagacaccatcggagaccgggtccgagctactgagcagtagacgtaactgctttgactcattctcgatgagagtcaccattcaattgggtgtgcattcatccatgtctgcaactgtgattgatcagcatagcggtgctagatccgtgtgcggaaataatccctgatgtacacacattgtacttggagatggatttttgtatcaagagattgtcagacaagactatatcataagcagataccttgctttactttatatgggctggcaatagaagacatgaggtgcagtcgtttctgatagactactactaagttatccgattccttactgaagtcgctaaatatccttccacctcaatatccgccacagcaagcggggaaatttcacaagaaaaaggcttagggtcgatggtgaatgcgaatctcggcgtcatcttgtttcttagtccagcgctcatgataccagcggtatatccctagcctcgaaacactacaccagaataagaatgtggctatttgaattttgttttagtgtcgagcagccagaaatgatatgagccctatagatcaaatccttatacgatcggctgtcgcgcggggtaaatcaccgtccaagatgaactcgtaggaaatttatcctgtctctggaggaatcaactttcttggccatagtattcgaccttgtcgtagtagatgatgtctccataacccgctttgttagctaatatctgctaagcatactggtttgttgccttgatatgttcggtgtatcgatcgatctccgtaggtctatcttataagttcctcggaagtcagtttatgagaaataagaatagtacgtcgcatatgcggtcaggtcattttgtaatcatttcggtggtcttctaagtgtatttttatagatcttccacccattctcaggtatagcaagtctggctatcaaacgaaagctattacaggaaatcctcagcatactcctcatacttctgcatgaagtcctccatgttgaacttatccttcagccgcttatctgatagaatgaaattgcctgtctcaatatatccttgtcggaatgctgtgaatagtgtcgggctcctcaaataatgtggaatgaaacgtttattatcccctgtcaccattgcccctttgaaagcttgataaacaacacctgggtcctgattaaggtctactgcctcgcattgtccaaaatctaagagatatagctgaacggcgcggtattgaaagtccggtccatgctcctgggcatctatgactgaagttccaagcacaaactccacatcatcgccgttgacggccgcggcccaatgtaaggttgcataggctttgcccatcgcattcgcaaaggggagagtctcaacgccaacttgctccatcgactcaaggcatagagggaagtttcgcagcggaatctcgtgattgatggtaccattttccttgccgagataaatacggataagacagtgcttgttttcagggtggttaaggagggcttccattccagcactatcaagatgctgctcgggggcacagaattgggagatcaaggcttttcgtacgacttttggtaatggaagaatccgttccattattaccaggttcccaggtactcgatgatcctcgggagtttttggtaagattttatcccagaacccgctattctctttcctagagatcaattcgaagggttttggaacgtggattcccccgttggtagactggtaatgttcgaatgcggccgaaacatcacagtgaatcttatactcatgatagaggtttgatggtagcttttcgtttcctggactttcttttttcaaggccagcggcttcccgacctgttcgaagatagctccctgtagaccagctccgatttggttgagttgttgcaagtcgggtcgagaacttgcagtctgagaaaggcggccgaaggaagaggccgtcaagataacagacttctggctgagggtctgtttgagaatttctgaatcggtcatgcgcgcgagatttgatgctgaaaattcccgagaagctctggcattctctgctgagctagccgattcatccctgccattaccttcaaaccgttgatccatagtaatcggtgctgatagatggcttcagttgttgtgtattgtgtattatgtgctgtgtgtgtgtgtgtcatgtagtcgtaatgtcctgtgttctaatcatgacgtccacaggccacgtgctcgttcccttctttccaaggttatgctatcaaagtaagcgagaacgatctcaatagttacgtgtcagagcaagttcaagttaagctcctatggaggtgactgactgtacgtcagagcaagtgaaatgagtataaagcccgatatttatcacaatcctattgagtacagcgtgtttgtcttattatgttcatgtatagtggcaagatatagacacgaatggcacccactcatatatgatataggtagatgggcagatggtcaaacgcccacaaatgtgccatcccttttttcgtttgctctccggccaaatatgaaatgtttcacacttgatttctcactctcttcccttcacttctctgttccattcatctacaacttctttcataccatctcacaacatatcttgtactaaaccacttccattaccttcttcgtgtcaaaaaaggtatataaaacaagtttccacaatctttgattaaccaagctaactagtgttgtcaactggagacatcgactacgatgaaggtcccccttggtccgtcggagcatccaaaccagcttttgcggaagcttggggcccagaatgacccggacctgtccattagcgatgcttttcgtctcgttggcctacggcgaggctggaaacaaggatctaagacttggaagagaaattggaatgcttgcatgaatagcgagtatgatcggttgattggctgccgggtctctagtctcgcaacttggcaacagctatgtgctaaagtgggaatcaaggattccttcagttcaatcacccagtgcaagaaggtaagacgataccactatctattttcaagtcacttgcttactattgtaggccctggtccgtgtccatgtgaacatcgtcgatgttctagattcctggaactccgatgtcaccccaatttgtttcagaaacaaggacgctcttgctgcgtatacccagtccagcaccaagttctttggccgagagatcgcaaagcaggataaggttctccgagttctgttgcgcaagctgctttgaagagtacagcgacatgtcacttccagggatatgatcccggagatgtactgggtgcgcagttcaagtgtggacgaaatcgatctgggaactacacgacaattgaatgtgggaaatttggttttgaatagctgaaatacctgaataacttgttgaaagcgttgtgtttctccatggtatagattatttcgggaggtcctcgtaatgtacatggcttcggtgtccttaaatgctgtcgcggcttcttcatcgtcatctcattacccccggtgttagaagagatatgcaaggtcccgaaactgcaaacgtcagtacggcaagctgagcctactaggcacctacaagacgggtatccaaaacaatagtatgtctgtggccgacaggcaaataagggttccgtttttacctaggcacaaaacaccgagtggcatgcaagctctttccaataacgaaattggaaaacattctctcaaatatcaccatatatcttctaaatacatctgattcaaggtatcaaacatgttgtagtcgctgggtagagaattggccgagaatgcaaagccgaggttattgatgaacagctcatcggggttagaagctgccccaagtccgattacgtcgttgttatcatgttgagtatcgctcgcagtcggaacatcaaaccaattgatatctggaagtgctgtgggcaaaatggtgttttcaacatgcaggtcttttgggtcgggcagaccttggaaggactcagtcggggccatcggccctggatagagatccccgtcttctggttgatatggaattgtgcaaaggctattgcattccaatgaaggagcgggaggcatgtgatcaatatcacagttcagtcgtttgcaatataatttctccagattgcgtccgatacgcttcgcgatattccaggacgtcgagagttcccgcaggacctgaaggcagagtcccacagccgcctgtggtgatggacctcgcaaactctggttacctgtcccagttttcacagtgggatcaacgcaccatctatcaatgatgatcgatgccgctgataggatgcagtgtgtggctgtcatggggctcagtttaaagctgccaaatgtctgtctatatttctgggcgacaatgcacattcctcgggcggagttgctacatatggtcatgactttctgtttacaggcaggcccccattctttgtggcttctgttctgttgtgtctgtgggtctgggggattgccaacatcttgagtggcagagttgttgctcagaaagggcacgcaaagtaaaatgcacacagtatggtataccatgcacaaagtgtaggtgtgaggaaatctggagggaccagattgacggtcgactttgagctctggaggtagatcgtagtaccaggtcttaagttcaagcacacaggattcaaaaaatgcgcaacgttgttggggttggaggagtggctttggggaccagcttgagcgatatatgtcagtgagacaggtagatgtaagaaatgacatggtagacttacaatgtaagaaggactttctcgaatatacgacacaggtcaatcattgccctatgcaactgtaccacgtctctttgagaagcggcccttaattgtctattgccatttgctgagggcaaatagacatccgaggcacataaagggaatggtttgttgacgacaccctgggagtcctgggtgataaattaacgtgagtttcgacgcaaaaaaattattgcctgtggtacaacataccagtaacgtgcacaccctccccgtgtagctcgctgacaatttgtcgtgacaatatagagcccaataaatctgccttcgcagctcaatctcgatgggtggaagagcaactgctccggaaaggaccgagggatccatgttgaaacccatgtctaaggccaggcgattggccataccttggtgaagccagccagcagcatcagaccccattgcctatcagatattagtttgattggctgggtgaaagtctgagatatcacacttacaatataagccatgcccatgattgccaaagactggattgttgtgatcttgggccatctgaggtcgtgttgaatcaatctttctgccctatcaagaaatattttgccggctgtgtttgaatcattggggtctgatctcacttctatgcgatcgcagtaacgtgaacctacagcgaggatgcaatttaaaagaagggggctgaagtatcgcccaccacatctcatagattctcgaaacagtttttcgtttaccacctgaagccatggctgttcccactcaaaatacaggtcgagcaagtgcgactgaagctcgtcttctggtatcaagctttcttctaatgactctgtactcccattcggcggtgtttcaccagtctgcatgggagggccatcggactgatatgcctcttcgctgggcgaatctggagatgattagcgaacctctatactgtggcgaaaaaaagaatggctactgtaggcttgccttttgatgaagatctaaatagcaatcgcccacttgtcggtccaaaataccgcacctcgccatcttgatcgaaatttaatgactcgtcaagcgtcaatgcgccgtcaaacgtagtacacaagtcatcaacattcgaggaagccggagcccactcagggttaggctctccattttttatcatcaattgaatggcagcatcagggtcaataccatgcgtgtgcagtacacgctccaacagttcaatgcgattgcgcagcatgactacataggacttaggtgcgggttgccgcccgtcctctgctgtggagtactcgcattgaacgccacggtcaaggcagcgagagcaagatggtcgaacaccatcacactattttaatattagcacaagctttgagtaatacttggtggaacaattatgatcttaccttagctcgtcgttgtcggcatgtctcacaggctcgggacgtatactttctacccggtcgcttgcgcctagcaggttcatccggtgctgtgggcatagctgaggtatacgggaaagaggaatttgatccagtgcacagtagactctagtactttaagcttgagattggaagccttcgactacttgggattcaggaatggaatcttccgaccttggagggttgcccaggtggaatggttgtgattacaaatcaattgcctcaggcaccaaggcataaagtagtcacccttacaattcaggccacagggtctgatgctttgcctcactgcctcacatcatacaacgacttagttatctgtataagctacagccaaatagaattgtggtttaatatttgacctgggagagttgttttcccaaaaagacatattgagaatgcggaacatattgtgggacagaactgacttcgtgtccaaagtatgttgtagttagtatatgctcctatacgtaatgacctctcgtcatgactaggtagagtttcatgctagacagacatgacccattcattaatacatgcctataggatatcggtgcaggctaaatagtgtagtaggaagaggaaagcgtaaagtttactcggggggtatctcctgttcgctccaaggtcataatgaaataaattgtcgtgaataagcctattccatgacactatcatatctatattgaagaatagcaatggaagatcatctccaaaaaaataatgaagccaaaccatcagctgactaccccgcagatgcgcagaatccaaaaaaaaaaaaagaaaaccttcgaaggtcggaaaagatgaagacaaataggtggagcaacattgaatgtggcccccgaacattccgggcctattcataggatgtttggatatattctaaggagagggggtagaattggagtcacgtagaatctccaattgtgataatattgtgctatatgactggctcaggttgatatggatcatgccagcaagggattatgagatcgacagtttctttatttccagatatccgtggaacaagtgtggattgaggatagaatactcctattacaccatttgtttcacagaatatctctctcctaatctcatactatcagatatcagtagtgcaaatgatgcagttggagagggaatgcgagctctcattgtatggggaattaacaattacatccggtggcgtccaatggacttggagaaatattttctttttctttttctttcttttggccttttctattttgcagattcggtggaaatatggctgtccggcatgaagggatatatatggtacgaagtacgaagtacatattacatgggttggatgcttttagacaaaagtactacgtctagaatagtgcttatctagatagtaccaatactgtctgtatatgtctagattcagatgtatttcacgtcctttatttgacatgtcatgacgttgagttacaaatataagatgtatataatacctataggagctctcgatggccatctcccaccacagaagggatcaacaaagtacaaaatcttgatcctatatactatatatgcacagtaaatgtccaggatatcaaataaaggacaagtcaacagaaaaaaaaagaaaacagagagaggtgggaagtacgtagtgcaggaaaagcacagctcaccaatcaccgccctcgactccttcgatttcccccccatcacgactcttcctcttaaacattctctcgacttgctcacttctacccatttctgtgacccttaggtctcaatttcgatccagtttcgttccctttctcgggtcagcctcctctgaggttgacgttgtcgatctagcgcgtcgctgtcgcgccattccccgcagagagacggcttccgttatcctccgtctaacgtttcgtgtttcaacctctgtgttgtctcgaagcctttgaatacacaaatttaacgttggattggtggactgccatcactccgagcttgcattgatctgttcccaagtcttacgacctcactatggacacttgatgctacggatgaatcaataacctcgattaagggcacccgcgctgcccagcagacggtcctgcttggctggaacaacactcttgttttattcaatttacctcgattcatcgcactgtcgccttcctaccccccttgaaccatgaatcccgctcggtcgccggagcgagccagcatggccagcaatgattcccccaaacatacgagtaagtaactaagtaaataagcagataagcctgcccctaccgccccccccccccccgggggggggggggggggggggggggggctcggaatatcgatccgaagatggctcggacattgagtgataatatgcgcgaggaacgtgaggatttgaaggaagcggcagaacagactttgaacatcattgtggatatggacctggagggttgcgtcaaatgggtcagcccatcgtggaagcaggtggtcggctcaccccctgagtcagtggagggccatatgatatcggaaattctgctgggcaacaaggatgtcttccgcgatgcaatcgaatccatgaagcaggatgattcgcggagtcgtttcattcgcttcgccctccagatgggaccggattctgtcctgaagtacgcccctgaaccaccaccggcggctagagagaaccgggccatcggggaaaagacagaggacaacgttgagaagtcccaggaggaggaagagcataatcacaatgtgctcaacatggagggacagggaatcatggtctatgaccggacggacgatgaagctggccatgtgcgtacctcaacaacctcaacaatgtcttgttgcccgccgccgtttataccactgacaccttctgaatacagaccatgtggatgttacgacctcttaccgagcccagagaagtgacaatcgatctgccgcctctgctggttgagtctttgggtgttggggcggaggtattagcgaattatttgaccgaattggctgaggctgcagcgacagaacccgattcctccaagcatcctgccccgaccccggtcctctgtcgcatatgtgaacgccagattacgccatggtggttcgagaaacactcagatctgtgtctgcaggaacatcgggctgagatggatgttcaaatggcacaggaaaacctcaatgagcatcggcatgtcattgtcaaggtcttagatgctttagaggcccgacaaggcagacctttgatcgggggagatggaaatcccatgcccctcccccaagcggagtacaaagggttagccatcggcccctcgtctgccagctctgctccgtcatccggtcctgtttcagagagtaattcagcgcccggcacgccgcctcggtcgcgcgaacattctgcgtccgatgctattccaaaccgaccgcgctccttcacagtgcggagaccactggctcgtatcgtcgaactcgttcttgacctgtgcgatacttcactagagattagtatgccgatgatcaaggaatcttcccggacagacacagaggacttccggacgctgtcaccacaatctgaatcgcggatctctcaggttcttcagtggcagtccccgagctctaacaccctggaacaagaacagggtctcgctgctttgtcggcagacactgaacaagtcgccaaggcaaaagtggatgccgttgtacgtcatcgcaagattgttgaatacgccgaacgaattcgcatagaatatacagtcctagtcgaggaatgtattggggcagcgctaagcaaggcggagcgcatagctgctggtcagctcagtgattcatcttgctcatctgatgaagaattggcgcctgagagcatcatcgacggcaatattactccgggcgatagcaatactgttgccgaggaagattccccctcacaaatcatgagccaagaaccgcaacaaaggccctgtccagcagcaccctctccgcggcgaccgacatctgcgctgactctgtcaatgcgtaattcgccagatcggtctttgctctcacaatcggagcgcagaccatcctccgcagcagtatccacaggttctaacagcccattggaatgtcctaccccgcgatcctataagagtgctgcaggactcctgggtacctcacagccttctcgactgggcctttccctatcggaaattgatgctggtgagactagcgacagcagtttgccttctgtcttcccgggagctataagaacagagtcaccctcatctgagaggagcttcgatcgaaagcgtcggagcctggtactgcctggactttcgagttctcctcgtcggcaaccttctcccgctcgaatttcaggtccgcattccccgttgcgcatgccaaagccccgtatgtctagcggcggtgaaagcctgccgtccccgatagcatctccgtctgcatacgcaagtgaattggcccttcatcactgccgccaccatcgccgggagtcctcggcgaattcttcagatatcacgaagcccccaccttccccacgcctaccttcgatgagccagcaacagcctcggcctgcgccattgtcgatccgcgattttgaaataatcaaaccaattagcaaaggtgctttcggcagtgtctacttggtgaaaaagaaggccactggcgagtattatgcaatgaaagttctgaagaaggccgacatgattgccaagaatcaggtcaccaacgtcaaagccgagcgtgccatcatgatgtggcaaggggagagtgactttgttgccaagctttattggacattttctagtaaggattatctctatttggtgatggaatatctcaacggaggtgactgctcatcacttgtcaaggttcttgggggtcttcccgaggattgggccaagaagtacattggtgaggtggtgcttggagttgaacaccttcacagccgaggcattgtgcatcgcgatttgaagcccgataaccttctcatcgaccaaaagggacatttgaagctcaccgactttggactttcacgcatgggattggtcggtcgtcagaagcgggtgctgaagaaccccgatgagtctgctccggatctactgaaacaaaatgcattcccccgtgcgatatcgattggatcttctcgatcggcctcattcgactttcaagcaagctcatcacctggctctacaccactcatcaccccggaagtgtccgccagtgccgttcagccatcctacttcagcctcaaccagaatagtttgagtcggcaaagctctcgtcgagcttcgggataccgcagcgatagcatgggcagtgatggtctcaatggaatgttcagggcattctcgcttaatgacaatacacacgaacctcctgtctcatcgccgagtatgttttcaaccagcatggttgaagaagagggccaaagcgaggccggcgagtcccctcgtcttcaacccctgcatccaacattcagcaatccattggcgcagaatacccctccccatcaaagcatgatgcctccagtgatggctctttttgatcccgaggatcacaatcgccgttttgtcggtacccctgactacttagccccggaaactatcaacggcattggccaagatgagatcagtgactggtggtcattgggatgcatcatgtttgagttcatctttgggtacccacctttcaatgcggacaccccagatgaagtcttcgaaaacattctccatcgcaggatcaattggcctgaggatgcagaggagttgacttcagcggagtcgttggatctcatcaacaagctcctggctctcaacccccgtgaccgaattggagccaatgtcgaagagaagttttcaaatggcggtgcggagatctgcagtcatccttggttgtctgacattaactgggacacactgcttgaagacaaagcacaatttgttcccaacatcgaaaatccggaggacacagagtactttgatgcccgtggtgctactcttcaatcttttgcagaggagttggaagatgagaactcaccacaaacgtcagcttccgctggccccgaccgacctcatgatgcactgttcaaggtccgttctcaagtcaattcgtcgaaacgacctttgatgccactgcacattcctcctcacgttcgtgatgctcgggattcacgaagtcggagactgagtgaaccagccttggccgatgattttggcagcttcaactttaaaaatcttccgatgttggagaaggccaacaaagatgtcatccagaagatgcgccaagaggctctgcaggcacagcaccgacaacccagttcgtcgtcggccgctcagacctcgagcacttcatctcagccgtcattggaagggagcccactgccaatgtcactccagcgaactctgtcacagaacaagggcaataatcgaccttcttccccatcaggcctaagtcaaacaaactcatctcccagcaggccatcgcagccatcttctcctctcctagttcagttcagcactgggaataatcaagagcggcgcaagacgtcgggctcctcgtcagcctcctaccaatcgagtggggcctttcagccttcctctgctgaccagggccgcatgccaaatcttagattgggctcagtggcatcctctcccgtgaaatccaaccgaatgccagctcactcccctgacaagacgggcaacaatcaacgccatggcagcgtcccagcgagccgtacccgttctcacaccattggctctcaagatggagatgtttccgcgttccagaaagaaccctttgtgccccatcatcctaagcgccggagtcagctctttgatatctcaccttcatcctccgacaatgaggatccacgcacgaaggcactcttgaaggtccaacgccggcgacaaagctctcgacggttgtcgcaaatcaacatcctagaagggccctttttccggccattggatgtgctcatttgtgaagatcaccctgtctcgcggctggtcatggaacgcctgttcgaaaaacttcgctgccggacgatcaccgttacgaatggcgcggaagctgttagatacgctctcagcgaggttcagttcgacataattatgactgaatatcgacttccccaagtcaacggagtagactttgctcgaatggtacgggagacacgcagtgctaaccgacatactccgataatcgctgttacgggctacttgaaagacctcccggagaatcacaacttcgacgccctgattcaaaagcctccgacactacccaagctgaccgaggcgctttcccagtggtgcatgtggaaacctcctccaacggactatgttccctcccaacctgttcctgttcctgttccgggatctaatgctcggtctaccgccgtgatgaatgaggacagccctagttccgcatcctctggatttgtccttaatccccccagctctcaccgaggatcaagccgcgaagattcgctcagcagcagtgtgttcggagacatggagtctttcaaacccgaaaccaaacccgaggacattcctctgatcataaatcgaacgtctgatgattgggatcaaggccacggtggattagggatatccgaagagccaatgaggaactctgagaggccaaatcccaactctgtacctgtgcctcaccttcttcatgctgcatcagcgcccgcggccatggattcaagcggtgaacccacaccccggaggcaaccgtcaagtgaagctattcgcgccaaaaaggaatccatcgaaaagaagtggtacgagggcgccgaatcgggtgacgatgaagacgaagagcttggaaactcccaaacacgtcgcagcccaccctctcgaaatcgccgcccgggctcgaaactggggattgagatgatgcggaccaacagtcggggcagcgttgttagtggcagtgaagaactattgaagaaggagagggaggctcttcggaaccaagccgcggagtccacccataacggagacagcgatggctcttttggttctcctgccagtacaagcttagaagatcgttttgaggcccttagcatccccgaagaatcggagggtgaggagccacccagtcctcgtacgtccccgacaaggcttggagcacctgtctctcagtatcaccggccatctctagcgcatcgggatacctcgatctattctggaatctctccgaattgtacatcgaagactagcccaacattgttgagtcagggtcaaactacacccccgtcggactttccgccgaggactgtttcccatcccgctgtcctgccaattacccctgaagtcaaaatctccggcagcgcgctgacccgagacgcgggttcgggcgtggacgccaactgtagtcccaccccggacgctgaagctacgccgcgacctcttcatccttcccctaacctggatccggagcagacgcctcgtcccccggagcgacatcgatcggactcgagttttgccttcaaaagatgatcttgcgatatctttctattctgtctacatattatctgcacacctacttttgtcttctctgtaaactttcctgtgtttatctatcccggggaaaccttgtaccccgtggatacattgtcatatccactccctcacgtctcttatgtctgaatgttttctttctgaatctcggagcaaggtgttccggtctttcgttttacttggcattgtttcatttcatttcttttctttccagtctttttttttttttttttttttctcagcgagaatagtctctgtttcaacatcttgaccatgtggtggaaattccaacatcagcttgacgctgtttttcctttttcctttttgtgttttatagtttgttaggataccctgaggatcccgaaatattatcttgtaccagtaagggtacttgtcttgaagccgaagcattatttaactactagcgcttcacagccacctcccacattggcaatcggcgatgatcgctccgatcaagcgttctgattggacacaatcctgattacttgtgaagatcttagacaagacctcggttagtgagattaatattatcttgtccagagtttaccgttttgtttttctgcatccaacgtacaaagtacgtgatgatcgcaaccgtgcataagatacggagaatagctcgaacatggagagcatggactccgtaataattggtctaatagcgcaccgagcgccaagaggtcatgaaaccgcctcagtgcgtaagtcagtgcttgcgacgcatgttgtatgtacaacgtcactaaatcataggctcggatttcttttggtttggaagggcaacgtcatggttgtatcacagaacacctggatgtaaacattctatactctttactgtttactgttttcctagaatatatactgtatgttgtatgaattgtagccaccggtgtttacatgacactctacaacacacctaactaggttggaggcgtcctgggcgttcatgatcactataagcataaagccagtctaataatagtctgacaatatatattaaagttgctatctatcacagactcggtgttctccttttatgaacacaatttacactttcaagtcaaatccaagacaaaatccctttctcgccacctggtggatcggcaaaacgttggcaagccgtgatgggccacatttgtctcgaagatcattggcagttgccctgcacattgcgtatgtggaacatcttatttgactgctcccaaggttggtggttgaaatagaagttggaatggagttgttgtgtgtaaaaggtacgttggctgcgatagactgttgtatacaatgttgtataccacccctatatacatcccaacaaccccttatttgcgagtcgcgatgctctaaatgaaggcaattaaatctaaatcgagttaatttcccacaaccaatagcgtatttataaaaccgatcgagatcatcgtgaaatgtaaaagtccaggctctgcactgttatgggtcttccccatcaaactccacttggccatgtcctcttctcttccttcacactctctcgctgtgttcttttctgcctctctgctgtcttttttcttgtttgcttcggttgcgatgtcatcgagacgaaacgtataatatacattcaatatacaatcccccctcggtcactacagagtacattccagtctttcctctccgccttgacagaatttcgctcatacttggcccggtgccatcatgtcgtcccccgtggaggaacgaaaagcccatatcgaagacaaggacaagcgaaaacactcggacgtctctcctccctccaatgatggcacttatgtgaccgagcctgacgctgatcgcgacacgggtcacttgaaggtcgacactacacattatgagcatgatgatgatgggcatccgccaatgcgcaccccatccgcccgtcgggagcaggccactcgtctggaggatgatttgctggtcctgcaggccgagcgtatgacctcgcattcgaccggcgcaccagacgacgaacacgatcgcaattctatccatcgcacccgttcgcgacgctccgaagccgtcgatgagtttgatgaagctacaaatcccctgcacgaaaaggccgcaatttacaaacccccggagaatccaaacacccagtttgccgtctttgtgaagaaactccatcagtcgagtttcctcgtgcgctacttgacctacattgcccccattgtcctcattctcttgatcccgttgctggtcggcgctctcaggtttcccaatgccagtgtcggcggtgtacaattgctgtggttttcaatctggttggaaattgtctggttgactctctgggcaggacgggtgagtccaatcaatgaatcatttcccaacgagcattactgatctatttcctttcttaggtggctggcaagtgcttgcctccagctgtcggtctttttgcgagtgtctttaccaacaacgccaagaaatggcgcgacatggcgaaacagctcgagtttcacgcggcgctctttttctggtggcttggcgtggagatctctttcctgccaacgatgaaaaaccaccatgtggatggtgatacggggaccaagggatgggaaatcactcttaacaaaatcatcattgtcatcttcgtgtggactatcctgaatttcatcgaaaagatcctcatccagttgattgccatcagcttccatatgcggacctatgcggaccgcattgagatcaacaaattccagattggcagtctgtccaagctgtacgattggtctcggtccactcttactgagaaagatgaagcatttgaggagaaggacgacgaaccgagttccacgggagtcaagaacccgttgcactatgctggcctggcccaccggaaggccaagggtgccctgaacaaagttggaaaccgggttggcgatgtcgcaggcgcggtcgtcgctgacgtcactggacgcgcgacgactcgcagcaccgatgcctatcaggtcattttggcgctcctgcgaactaccggaggctgtcaggtcttggcgcgtcgtctgtatcgcacctttgtgagggatggctttgagaccgtttttggtggtgacttgaaagccgcatttgaggacggcgaggaagccgaagctgccttcgctatgtttgatcgcgacatgaatggtgatatttccatggaggagctggaggccgtttgcgttgacattggccgtgagcgcaagtccattactgcatctctcaaggatttggattcggttgtctcgaaattggacaatgtcttcatgttcttcgtgtttgtgattgtgctgattgtatttttgtcgctcatctccacctcagccgccggtgtgctcacatccgcgggctctgctattctcgcactgtcctggttgttctctgctactgcccaagagttcctccagtcagttgtcttcgtctttgtcaagcaccccttcgatgttggtgaccgtgtgaccatctacggtaacgctggagattccggtcttggtgatgattactttgtgaaggagattactcttctgtacaccgagttcaagaagatgcaaggccatgtcgtgcaggccccaaatagctacctcaatggccttttcatcctcaatcagcgccgttcgggcgcacttgccgaggcggttccaatcattatcaagtatggcaccagcatcgaccaactcgactccctgcgccagcgcctgttggagtttgtgcgtagcgagaaacgcgacttccagagcaacatcctcaccgaaatgcgtgccgtcaccgagaacttttcgctcacactcaacatcgtcttcttctacaagtccaactggcagaacgagggcctacgtttgcagcgccgcaacaagttcatatgtatgctcatggtcgccctccaggaaatcggcatcgagggcccacgcatgaacctccaaggtgccaagttcgacattccgttccacgtcaactatggcaatacacgctctgccgagcagcaagcccctatcgatgccgacccagtccccatctcagaagaatctcaccacctgccagagaataccggatccagcagcggcagcgctatccgtcacccatcgattcttcgcaagggtatgaacactgccaatgcccgtgcacgcggcccgtctgtctcacagcacaaacacgtcgacttctccttgggcatgtccaacatggcatccaacgatattatgggagatgtgtttgaggatcggggtgtggtcgtcggtgaagtcgtccggtcggccaaccgcgatgctgcagaccgccgcatccaggaagagaacgaggacgaggaggagcgcaagagccgtacatcttcttcccggcatcgtcgcccctccaacatgagcgctccctccaatcatgatgacggtcgccggtcgaccgacgctcacagcttccgtagtggccagtcatcgctcagccgtaaccggttcttccaacaccgcagcagcgtaggtcacgatcgcgatgacttgatggagcaaggccgcgtcgatgagcctactcctccgccaccggccacagtccctggtgccaaggagcacccatattgatttgagatgcggtcattttcaatatcgtgccatattcactctcccagtgaccaatttgatatcgaaaacggctgattgaacactgcccgctgtggttatcttttcccctagcctctttggttcaagcgcagtatgagacatgtgtctgcaatgaggtcggtggtgaaaccgcgacctaagttaaatctcataggttcagacatgagaaagattccagtattgaagcgaaattgcaagtggatgcattgcaaatctgtgtgaatatataaagtctacttgatcagagaaacaccacgctacactatatatattttacaaatttcaagtcgccttcactgtattctagctagaacaccaatgggggaaatatctgaaaatacaagcctttcaagagtttcatcggtatctccgagaatctgctttactgtctttgtatggcgcctttgccccgttcctgctctcctggagatctgtccattcgattgacgaagccctgaatttgatcgacaagtcgaaggacggaaaaaaagtatcaaaaaatcaaatcaaattaataagtattatgtgacttttccccttgttgtataaccaaaccttgaaccctctagtgataacgccatgatccatgcaaaattattactagtgatacaagtcgaagattcccttcaactgtcagcagcgacattgagctcttgaagaaccttcaatgtgtgctcataggtccacatcgtcaccgcacttgccggtgccgccttgagtaaactgaccgtcaagccgcggtacaaaccacgcacaccctgggtgcgaacaatcatggcaatacttcggaggacgccgttgtactcagggatatttcgatgaacgtaacgggtccttgttggaccctgtacctgcaagcgctttcgcacgaggtctagggggaaaacacccgtcttagccagtacactggccaccacaccggctgcggcatcgcctgtaccaaacggcagatcctcccaggtcatgactggtctaaccgcctcgtatgttgtgaaaaagagtcccatgtatggcacaatttgtgccacagcggcagaacacccccggaagaatcctggtgcgccctcctgccgagcgatctcaacaatcgaggcgcgaagcgagctatacacacggtccgggccctgcgcggcaaatcgcgtgcggaggaggtcaagcgggtatgtcattcccgtggcacatccgcctcccactgcaccggaaataaaggattcgacaggttgggggagtctgtaggagccaagttgggcgagggcttgggttgttcctcgatacgcggtgaattgcatcgcaccatagcagacatacatcatttcggcaggaatattgcccttccaaaggccctgtgagaacaaatcccagttagtatattgacattaatgtcgggaagcaaggtaatattttcaacgtacagtgattccctcttgcttcataatcgtccgcatagtggacaatgtccccttataaacaggcccattgacactattatgggacgcagggtctgacagcgaatggatttgcaactgcagtctgatcttcacgacgtctagcggcgcaatacagaaccgcgagatcagccctgcaatcccgccggccaatacgacctgtcgcttggtgccttcatctttgagatgttcgccaccggccgacatgagttgaaagtgctttctcttacagactagagatgtctgtatggtggttgggttaggttaagaatattgaagcatgaagacccatgttgagtcgttgagttcaccttgggaatgtttaaaaaaaaaacaacaacaacgtcaattgggcaatttacgtaagttccgggctggccctggcgaagaatgataactatgtttgcctgaggtataaatattggcctgaggtgtaatagtatgcctgaggtattaatttactgcctcaggcaggaacgcatactattgaagccgaggtaacttatagcttccctccatttgtcccgcgtgctccgcgaggtagattttgctctccctctctgccatttcactgattaccttttcttcttaactggttcacgggcccttcatgcatcgtctccgagcttcagctaccttctggcaattgccaagggccttattatactctaccccgcgccgtaacttcatagctaccccgagtaggttcaacagccccgtagagccagactctcacgacaaattggaatctctcgccccaggaattgaccatccacttcccataccacaagaccccagcaactctaagggggacgtgccagacctcacccccgaggtggtgacaagaaaaacccatgggaatggcatcctaaaagtgggcaaaaaagagtcgatctggactggaaaagaggaattgtacttgcatatggacaaatacacaacactcaaattgccatatacttacctgcgcgattcatgccagtgtgtagtgtgcaaggatcaacactcgaagcagcgctcattccgcacaagtgacattcccaaggacattgttccaagctgggttaattgggatgggaacaagctatcaatccggtgggacaaagacattggggggtcacagactgtacacgaatcaacctgggcccgtgactttctaaagaatcccattttcaacactcatgatcagcatcggagcgtgaactccaaaccgatcatgtggggacaggctaaaatggagaaaagtcaacattgggtgtcttacccggactatatcaccgataattccaaacttgccactgcgatgcaccagttgcagcgtctgggccttatttttgtgaaggatgttccagactcacgatcgatggttgaagccattgcaacacgaatgggaccactacgaaacaccttctacggatcaacattcgacgtgcgcaccgtcccagaggcaacaaatgtcgcatatacaaaccagttccttgggtttcacatggacttgatgtatatgaacgagccacccggataccaactcctccactgtctgcagaactcctgctcgggaggcgagtcactgttcgccgacacattttcggccgcgaaactcatgaaggagcaatacccaaaagagtatcaagtgctaagcgagcagcggctggggtacgagtacaggcacgaggaccacatctactacaacgaacgacccgtctttgagcatgattccgacacagacgagctgcgccatgtcaactattcgcccccctttcagtctcccctcccgaatagccatgatgctgagcatgtgaacaagctactagatgcgcttgcgaagttcacttcgattattgataatccaaatagcatctttgagctcaagcttaacccgggtgattgtgtcatctttgataacagaagaatcgttcatgcccgccgccaattcaatgccagcgtggggtctcgatggttagcaggcgcatatgtcgatacggatgctctgctatcccgctttgctgtctgtaagaatcagcatccgtatgtttggacgaaaaaggcacagaaagagttggcgggtaacaatagtggcaacaactagacaaggagtgaaatataaggaaaataaagaggtcaagagggtgggcaaagaggagagagaggcttacaacacaaaaggttgtatagtacaaaatatgaagatcgattgacccaatatctgaatcgtgcccaagagttggcatcatttccttctttccagcagttgatcgaatatacgaaagtgatgttttgttagtttgggctgttccaagttgtgggcccatgatccatgcctacatatgtacatagaatcaaacgttgtaaatttattgtattgatattcttgagacccgagtggaggtgcagtgcagtaattcaacatagtcattgcggtacaaggtaagttgaactaccggtgcaagcatctgaagaggatgtgttgaatctggcatggcccacagggatattctgtgacaatgtactggtttgattcgacgctggttattccaatttatagcaaggacgtgtcccgcaacattgcgaaggatagatatgatcagacatgcgtataagccgtatgaagacaaaaacgtttatcattatgttagactttttagcatctagccccagagacagggggtcatgggtatcgtgcaacgatcaaccaaccactcaggcagccgcggtgggtttgttaactgagtgatcattgaggaagtcggggtcgctgttgatttcctcacggacctataccatagggttaataatcgaatcaaagaagtggagtgtgacggaacacgtacaatatccaagccacccaccaattccccgttcacccacaattgagggaaagttggccactcagcgtactccttcagaccctggcgcacatcctcatcggccaagatattgaagaagccgtacttgacactacgctcgcgtagaattccaaccagctgccgactgaatccgcattgtgggctgctcggggttcctttcatgaacagcatgacagatgctgcgttgaccagttgctcaaggcgggcaaatagtgcctcccgggattgttcgggtgtcagggtgggggcagacgcgacggcggttgcattagccgcatcagcagaagggggctcagcagcggtaacaggagactgagtagcagtgaaggggccatcctcacgagcaacagcagatagcggcggaggaatgttggctttcacaccgtccatcggaccgacggcacccgcgacatttccgcggccagcgtggcgctcgacagcgtcacgaaccttgacggcatcacttccactgatcgactctaatatttggccgctgcgtaagcacacaacgaacggcacggctgaaacgtcatactcttccgagatgtcaggtagctcctcggcgttgatgctgacaaacgagatagtgggcggggtagtggcggggtactgcgaagcgagggctgagagtactgcgcccatctgcgcgcacggggctgcccatggagtatggaagtataggacaactaatgcagacggcgatagggaagaaagatgcgaggagaagtcggcctcagacgtgatttcgatgagtgtcgacatgttggatgtgtgaaagaatgagacaactggaactgatggcaaagtcgggaatcggcgatgagaggtatgcttcgaaggcaagattgagcagtcaaggcgagcctaaagtcaagaagcgaagaagacttgtcagaagaatggcgtgatggataccgaaaataagccccagatttccattcgggttatcagatcgtttggcgtctctggcgcctctggcgtgccgtgtggtgtatgtaagccggaaaagtctgcgacacatattatccgatatacacgtgatctcaatcaacagcagcacgtgaccttatcgcgtatcatcatgaatttccatgccgcgatgctgtgcggcgaggaaactgcaaatccaaagacaacatgggaaaagagaggaagagaaagcttagctcggacgacccggttggtcaaccaacagctcaggtattcggtgtcgccgatacattgtcccggttgcagagcgataacccgatcagcgaaggttcgaacggcagccatgcgtcaaaaaagcgcaaaagagtcgacggcgagaaagtcaaatacccagatctcacatacgtcgatggaaaattagtgtcacctattcgaatcgccgatctgcaggggttgcttctctattgcttcgccgatggtatcgcaccccaatggatctccgtgaagcattctggccatgtgcgcaaggtggttgtactgatggtacctggcctcgagatgggcatgtttgatgggacaattcctgtgcaacgtgcatcagtcaccggggagcaagaaacacaggagcccaagatcaatgcgccggaagccaccgaggaggtacctaaagacgaacacgctgctgattacgagagatggaagcagggcctcccattgccggatcgctcgcatcgcttcaatcctcgatctatcacacgggaaaacctccctgaaccacttcagcccctggccgatatgtttccccatatctggcctgtcaaggcgccaggcgacaacaaatacaacaaggtccattcaccactacaggcgattcttatgtcctcgccccccaagacaaaaaatgatgactcccgtgcgaagggcgcacggcccgcaaaggttgagaaaggcttcgttccgaaacgaacaccaatcacagcttttgtcacttcacgcgaggatctactggaaaatgactttatcttgcaccctgttttcttctcttccgatgaggaaaagtcttcccagatggaggctcgtcagcgaggcagtcagtcggtggaagatggatgggtggatactcaagttccaaccctggagtccgctctaccacctgatattgaaattgagagtggcagtgtgactgttggtcgagatatttttgcgcttgactgtgagatgtgtattacagagggaggtcagtccgaactcacacgcatcagcatggtcggctgggacggcgaggtggtccttgatgaactagtcaaaccagcacggccggtgatcaactatctcacacgttactccggaattaccccggagatgctcgagcccgtcaccaccacccttcgtgatatccagcaaaggctcttgactcttctcacgccgcgtgcgatactcgtaggacactcccttaattccgacctcacagcactcaaactggtccacccgttcattgtcgatactagcatcatttacccacacccacgtggtccgccactcaaatgcagcctgaaatggctcacccagaagtaccaaaacaagcagatacaaaacggaatggccgggcatgactccgttgaggacgcccgtgctgttcttgagcttgtgaagttgaagtgcgagaaaggcgagcgatggggtaccagtgattcttccaatgagagcatattccgtcgactatcacgctctactcggcctagtcatctccctcggcctggagaagaacgaacaggagctgtggttgactggggcaaccccgaacgtggctttggggctcaggcaactgtctcgattggatgcctggatgacgatgcagtcgttagcggtgtctccgcggtaatcaatggagacgagtcccatccctctattccaggaggtggtgttgactttgcctgggctcggattcgtgatcttgaatatcttcgcggttggtgcagccgcctccctgatccaaacaacgccaacgaatccacaactcttttccctcctcccgaagaaacaacgccgaccacaacctctggcaatggggactcgacagatcttccgcggcctgacgtcttggctgatactctttcccggaccgtctccaacatttcgcgaatttacgactctctcccagcttgtacgcttttcatagtctattccggtacaggtgatccacgtgaggtgggccgtttgcaatccatccacaagaagcaccgtgaggaattccggtctggcaagccatgggatgagctgacatacaaatggaccgacgttgaggagcaggctctaaagaaggcttgcgagcgtgctcgcgaaggttgcggttttatgtgtgtgaaatgatttagccgaagctacgtatgccacactccaaatgtcctacgctacgattatgattctcatttcgcttccatctctgttgtatgatcgtctacaactgctgctaagaactcgatgtgcatgtttccttacgatagaatagccaaacacccagtaggatccaggtcaaacacaaaaaaggttcctttggccactggaaaaaggggtatgtaaaactgcagaaagaggacttgatatatccgaaagtgtgaaagattgtccgagtagcttgaagtgcaacctcagaagtcataacactttcattcacgtattgtaagctactaagttgcccatccaatccgtgttctgtatatatcccgtctggaatatcgggctgtggaagtccccacaggaatttgtggggcggaggtgggagatttctcccgacagcaacggacacgaacctttcgcccttagcaatgaatcccttcaaacgggcaaccgcagcctggcatcctgttggtcttgcatccgagtttccgagcatcgatgacgatgcccggattgtgccaagatgcaaagctttcaatattcccaagacaaacgacgccatagagcgagttgaagacattgacctaccaggagaactgaaggaccaagtcctggtgttcaaatacaagggcaaataccatgccattgatcatgtaagtcaaacggtttttccaattggaagcattgagctcacccattctagcaatgcccccactcgtcgttcccactttcacaaggccacctctttgatattgaagacttcggcatcgtgctcagcgcaggtctcacatgtcccaagcatggctggtcatttgatttattctctgggcgtgctgatcgcggcaactacacactcaaggtgtgggaggtacagctgcgcgactcatcggcacttggaagtacggaccaagaggtttgggtgaggcggaaacaaagaattggttaacattggccattagcatcgtccaattttccttagtgacttatcataaaaagtgcaccaaggctgagttgaccttcctggagtgattgaatttagcaggccatttaagctactcctcgcaacttgttcatctaactatccatatcaaagtattcatatgggtagcctgtcgatccctgctttagattttggctcgaatgcgacccatcaactttgtggagctcgggtagttcacgaagtagtaattgcacgagggaagaagcttgtctccatccaggggtaaattggtctcgagtttctacccaatcacttaatccttggacagtaggccaactatctgtatattgtatgcaacattcagccccatctgtcaagcattactcatttttctggcagccaattgctgtctataaaagcaccaaaatgtcacacctagcgcctccattaggatgaatcccgccaccatctcgatgcccaacgagtcacacccagtcaataccatgccaatcaaaaggttcgcacacccgccgaccatctccattctacccacccaaatatgagcgtacgagacccatgtccgggcgcggattcggacaaaggtaacatgatgccaccagcctagcagaatctgtatgagcagaaacgccacaatcattccaccgaggaactggtgagtgttgaagatcgccgatgccttcgcggaatcggaatcatggcgcttgttgtgactgtgaccgtgctcgtgcgcttgattcaaggcgataccggtgcccgccccgactatcatacaagtagttgccagcccctgcaagatccagtggtaggtgaacgagcgtggcgagccacttcgcaaagcgaggacgccgacaggaagaagaaagaggaagctacctgccatcatgatcccgtgggtcatttgcaagagcgcggtggccttaaccttgcgccaggtgttcgctgctgtagcagcgatgccggaaatgccgatcggagtgtccgaggcgcccaaagcctcgatattgggccgcagtggtggaaatgagggatagtagtcccccggctgtgtcagagagcgggccatgtcgacgtagaaccgtacccagccaccattgcccacgtggtgtgcatacatgtctaatggtgcgtcaaagctgtacatggggaatttctgctggttgttccaggcccttatccagggttgtgaggatgacagaggcgatatgggcgacgtaggccagcgagcacaggagtagcagatcaaggacaagtgggcggactgaggcctttgacttttagcaatggtgtgttgttcatgatgcatggatggcaaggcggacatccaagaggtttggagaaggcgaagatcggctccgcccatgtcgtcgtgggtgatcaggcgaggctggtgatggccatcgacggttcggatacttagcacgggattctcactggattcgggatccccatagaggataaacatcagggagcctgccattagagacccggtgccgatggctgtccatccgagatctgagtcgcgagttattgagagactgaggtagatgtcgtgggtggtggtggaggaggagttgaagtgtgtcgaaacacccagacggaaattcaccttgtcttccttagcatcatgatggccaaattggcagtattggacgggttcagcttggcagaccttgtctacaaacagcagaaatagagggaacgaaatagaccatcaacttcatgactagacattttgatgcattctgaggagatcactgtcgccccatgcagttagtagacctctccgtgcggcattcctttccctttctctttcttcctctggcagacaacttgccggcaaacgcgcagcttggcgcgtcggcgttctctttatgtgtctgcagagatgcttctcatgtgttctggtagatggaatctggcttgctttgtggtgcgaagctatatagacaggcttcagtacagtagctagtttcgtatcttccatcaacatcaccttttgctatctggttgatcacctcttccctcgtagtcagaacctctcatcacattccttgccaaggagaaagaggatgacagtgaaaataacatattcatactagcctttattctttccgaaggaaaaaagaggtaatcttgtctttttatgcattgatgcatgggaatgaccgtgcatgagtgaccttacaggctttggtgcttggcgtaattcgtatctttcaataacgattcagaagacagacgacagatgtgagatgtgaggtgtatcagccataatctatgcaatggagtgggctctgcttttactctgggcattgctaggggaggcagttgccaacatcccacactatcagctgacaagctgtaccaagattccgcccgaatggactcggcataggcgagctcacccggacgagatggttgacgtatcaattgggctcgtccagaatcgattacctgagctcgaggagaggctcctacaaggccgacatcctgtatcctatggaataagcatatctcacacacctcttcagtctctgacccttctcatccagattatggaagacatctctcagcccaagaagttctgcacctcatacggcctgtgccagagtcgattcccaagatccaagcctggctggatgaattacaacccctgaggggccaatatcacaatatctcccgccggtgactggctggatcttgctatgcctgtctcgtgtcttgagcagctactccaaaccgaatactgggtcttcgagcagccggggtctgggattcgagcaattcgctcacacgaatggtctctacctgctgacttgatggatgtggtcgatgtgattacaccgaccaacgtttttatccacccgaccgtccaatttcgattgggcgcacctactccaatctgggaagaggaaagtcatctgccgatgtatcaagacctcatcgatgaagatctattagatcgtggcagactggagattctgacccaggaggaactatccgcgaatcccacaggcgactggtgccaccggtaaatcatcaccatatctttatgaaatctaatttgcgcaccctaagatacaatgtttggattcagataccacacctttaaccgcagtcgcaaccgtttcgcaaattgtcctcagtgcgacccacggtgccgtcagcggtgatgtgtctctctaccaacgactgaatctactaggtggtgcattagccaacatcggtgccaacaaagcctgtggtacgtgtgttatctatctccttctttttctcactccccgggtataggagctaatatttccgacagaactaatgggtgactttcgcgtgggctttcttctgcaaaccccaccacggctccaatactttgctcaactcatcggaacactattcgccacaattgtcgccccggtcatcttcaaactcttcactaccgcttacccatgtatcattgctgagggcgcaaatggtaacagtaccgatgccgccgccgctcaaggccgccgctgtgaattcagcggaccctccatcgcgacatggcgcgcggtggctgtcgcaacaacctctggagcctctgggcagtcggctattccagaagcgagcgggcgattcgctgtgttgttcgcagccgtcggcgtgatgattgtgttactgcggaatatgctaagagctttcccagctaaggtatatttgcctaatatgatgatgatggggttggcttttacgatgccttcgccgccgtatggaattgcgatgttgatgggggcactgggggcacgcatgtggaagtggagggaggagaggacgtttgagacgtattcgtcatcagtggcagcggggttagtggctggggaggggattgggggtatagtgaatggagttctgacgattgcggtgggctggggaggagatggctgaggtactggtttgggatgtcccagtggccggggttagcgaattagttatgcttacgcatatctagaactttcataaagtagttttgtcactggttttagtcaatgcgtttctgcacacggctttgatttcaaataaaatttactagatgataagttgacaacgcagagaagtagttacacaggtacccaaactaccaagaccatatagaccatctcaataaatactctcatgaggagcttctgtattgtagttataagccagggactaccgtggacggtttgttgaccgaaataaatgaaaccactactcctagacggctgtatgtattgacatttatatctcttgaggcccttaacgagattaaaccatccagccaagcagaccgcaactctagcaaaagcaagccatagaatattggaacactttggcagacacagaagtaagtactctctttcgcctgtaactattgtcaatctggatcattcttctagaatgtcaagccagccatgcttcctcatacccctgcgtacatttgactttccagggttgacttttgagtctggctgatttgtgtgttaggattctatatattctaaggtagtatgtgggattgaaaactgaccatttatttgtccgcggtgtaagcggtggcagcatcggcatcccagcggcgatagacgggctcggccacctcagagcgcttgtcggcggtgtatgcagtggcaacatcagcaccagagcgcttcttgtcggcagtatatgcagtcgccgcgtcggtatcccaacgtttatcagcggtgtatgcggtggcagcatccgcatcccagcgcttgtcggcagtgtaagcggtggcggcgtcggcgtcggtcctagacttcaagccaacgggggatgcattgacgagggttacggcaaggaccaacgcctgggtgagcgcaataagcgtcattctgaatgataagcctcaaaaatagaattagatgagtcgagtggagatatcttgacagatgatagatactgttatttgcccgatgaagctccctcttaggtgcgagcgaggagatacttatatacaaactagagcacaagtatggatgctgaataaaggctccacagactcattcgaatattcagttcatcttgtcacagccagtatcctattacgccatggcaggggattctgcacggtcatcagatgtcttggatgtacacgacattcttgttaccccctttggcacaggatcatcgactgaccatgcaggacgatggcttcagcgcatgaagagcccactccaacccctccttcccctcacctatgatgagaaatgacctttttcattattagccactttgagacataattgcacattgtgcacttctcgaagatcatctcgcctccatatacctgcaaccactctcaattccacattcggcccccctgaatacctagacaatatggacgcagaggacctgaagaaagaacatcgaaatagtatgtcgcccacgcagccaatcctcgacattagttacaatgaccgagagcctggccaccacgaagtggaatcccaacaacactcaccatatcgccccgcctcctgggcacggagagccctggtgatgcatggattgataatcctcttctatatcggccttgccgtttcgtcgtggacaaatattctattgggggaatgtcctggtcggagttcaatctaaattgtttagtgagtgcctaatccatggtgaagggttgtcagagaaccggaagtgtctaatagcaaccaattttagcacctgtccatgagcacatcaatatcgaagtcacagtcatttacgacaagcccagcgatatcaaggctagttcatatgtgggagagcctagtctagtggttgatgaggcctggtatcgactcttgcgtcgtaagtcatcctggtacactttatattgagattgtccaacgtattttcttctagatcacaacatacgcattatggaagatgagctgcaagcaatgaaccaaacctctattcccctccgtcatgggggtggatatcaaggaatgatggccgtcttccacgaactacattgcttggtatgttctttctttcccattgtacattcacaattgactgagcacgtcggatacagaaactcgttcgtgaagccgtccatgccgactactattacgcagaaaaatcccatgccgagagagccatgttgattggccatacaggtcagttttattctagcttcttccgttacctgcattcacctccctgaaaaataaccgttaaaactgggatcaaagcattgcatcgaaattcttcgctcggcatccatgtgccgcgctgataccgccatctttccataccactggaacgacgccacgcggcttcccaatcccacatgggtgcagaagcatgaatgtgtgaactgggcctctctggaggaatggttggagagtcgacggattgatatattcgcccctaacatgcgggtgcatccgaagtatggtgaattttgagtttgcgttattacaccaggcaattcgttggctaactgcataaaaccgtacataggccccgcatatccaggagggaagcggatttccgagccagttggaccgaaagtctatcctttagatgaatgatggagaatcggttaaatttctggtcaaacaaaatcagattcgttcatatagcctgtaagatgattgaaactaatgatattcagttcaagacttacgaaattccagctctaggtgtgaaaattgttaagcatgtgtaatgtttcttgcaagcctaaaccaaatgagccattgtggatgatcttgaagcctcgacctttcttttctcattagaaagtggtattgttagtaaggtagagatgatgttctggctgttcagtgaaagtacatcataccgtgtactgtaaactgaagccattcctaccccatagatcatcagtttcttcgaattctgcgcgttaagaaccgaatctgaccgcaaaacgggtgcatacggaaattagcatagtgggaatggcttcattcttttagcagagagatttgcacggaatagcttcattttttgaatttggataccatgcttactaaagccactgttatggtaattcaggctcgcacatcacgtcctgatcgtcttcggcagtagttttttcggtagcttaaagcacttccgaattcatggcagtaaacacccaccgggttttagagctttatatgtttgcgcagttattcaggccacaggtgtgcttcgattattgtttcaattacttcgcatccctggaatcagaaatatcaattagcaaataatagagtatatttccatacatgtacttgatgtaacccacattaatttgagttagtcaaattcccatcgaacgtgattacttcccaggatggtggcctgctagatgcccatgctgatcaaccgccccgatcttgtcgccctcaccatttggatacgcaactctctatataggaaatcatagagcctaagtacatataaaataatgagtatttactattattttagtatcactagaaagcccttttcttaagcattctagatcatatcttatctttcgtatccagctagtgtagcgtctgaaattcgtggttaaagttaaggtatatctttgaggtttagggctacgggaagaatgacactaacctaattcggccatattttgtacgcaccataactacctcttaactgtattttaaccctttgaaattttgagtacttatagtagggaccttaaatttgtgcatccaatttactannnnnnnnnnnnnnnnnnnnnnnnnnnnnnnnnnnnnnnnnnnnnnnnnnnnnnnnnnnnnnnnnnnnnnnnnnnnnnnnnnnnnnnnnnnnnnnnnnnnnnnnnnnnnnnnnnnnnnnnnnnnnnnnnnnnnnnnnnnnnnnnnnnnnnnnnnnnnnnnnnnnnnnnnnnnnnnnnnnnnnnnnnnnnnnnnnnnnnnnnnnnnnnnnnnnnnnnnnnnnnnnnnnnnnnnnnnnnnnnnnnnnnnnnnnnnnnnnnnnnnnnnnnnnnnnnnnnnnnnnnnnnnnnnnnnnnnnnnnnnnnnnnnnnnnnnnnnnnnnnnnnnnnnnnnnnnnnnnnnnnnnnnnnnnnnnnnnnnnnnnnnnnnnnnnnnnnnnnnnnnnnnnnnnnnnnnnnnnnnnnnnnnnnnnnnnnnnnnnnnnnnnnnnnnnnnnnnnnnnnnnnnnnnnnnnnnnnnnnnnnnnnnnnnnnnnnnnnnnnnnnnnnnnnnnnnnnnnnnnnnnnnnnnnnnnnnnnnnnnnnnnnnnnnnnnnnnnnnnnnnnnnnnnnnnnnnnnnnnnnnnnnnnnnnnnnnnnnnnnnnnnnnnnnnnnnnnnnnnnnnnnnnnnnnnnnnnnnnnnnnnnnnnnnnnnnnnnnnnnnnnnnnnnnnnnnnnnnnnnnnnnnnnnnnnnnnnnnnnnnnnnnnnnnnnnnnnnnnnnnnnnnnnnnnnnnnnnnnnnnnnnnnnnnnnnnnnnnnnnnnnnnnnnnnnnnnnnnnnnnnnnnnnnnnnnnnnnnnnnnnnnnnnnnnnnnnnnnnnnnnnnnnnnnnnnnnnnnnnnnnnnnnnnnnnnnnnnnnnnnnnnnnnnnnnnnnnnnnnnnnnnnnnnnnnnnnnnnnnnnnnnnnnnnnnnnnnnnnnnnnnnnnnnnnnnnnnnnnnnnnnnnnnnnnnnnnnnnnnnnnnnnnnnnnnnnnnnnnnnnnnnnnnnnnnnnnnnnnnnnnnnnnnnnnnnnnnnnnnnnnnnnnnnnnnnnnnnnnnnnnnnnnnnnnnnnnnnnnnnnnnnnnnnnnnnnnnnnnnnnnnnnnnnnnnnnnnnnnnnnnnnnnnnnnnnnnnnnnnnnnnnnnnnnnnnnnnnnnnnnnnnnnnnnnnnnnnnnnnnnnnnnnnnnnnnnnnnnnnnnnnnnnnnnnnnnnnnnnnnnnnnnnnnnnnnnnnnnnnnnnnnnnnnnnnnnnnnnnnnnnnnnnnnnnnnnnnnnnnnnnnnnnnnnnnnnnnnnnnnnnnnnnnnnnnnnnnnnnnnnnnnnnnnnnnnnnnnnnnnnnnnnnnnnnnnnnnnnnnnnnnnnnnnnnnnnnnnnnnnnnnnnnnnnnnnnnnnnnnnnnnnnnnnnnnnnnnnnnnnnnnnnnnnnnnnnnnnnnnnnnnnnnnnnnnnnnnnnnnnnnnnnnnnnnnnnnnnnnnnnnnnnnnnnnnnnnnnnnnnnnnnnnnnnnnnnnnnnnnnnnnnnnnnnnnnnnnnnnnnnnnnnnnnnnnnnnnnnnnnnnnnnnnnnnnnnnnnnnnnnnnnnnnnnnnnnnnnnnnnnnnnnnnnnnnnnnnnnnnnnnnnnnnnnnnnnnnnnnnnnnnnnnnnnnnnnnnnnnnnnnnnnnnnnnnnnnnnnnnnnnnnnnnnnnnnnnnnnnnnnnnnnnnnnnnnnnnnnnnnnnnnnnnnnnnnnnnnnnnnnnnnnnnnnnnnnnnnnnnnnnnnnnnnnnnnnnnnnnnnnnnnnnnnnnnnnnnnnnnnnnnnnnnnnnnnnnnnnnnnnnnnnnnnnnnnnnnnnnnnnnnnnnnnnnnnnnnnnnnnnnnnnnnnnnnnnnnnnnnnnnnnnnnnnnnnnnnnnnnnnnnnnnnnnnnnnnnnnnnnnnnnnnnnnnnnnnnnnnnnnnnnnnnnnnnnnnagtcaattgtctgagttaatactctgagttaatcctctgagttaattatctgagttaatactctgagttaatactccgagttaatattctgagttaattatctcagttaatcctctgagttgatcctctaaattaattctctaagttaaacctctgagttgatcttcctagtttatattccgatttaattctctgagttaatactctgagttaatactctgagttaatac
